United States Patent Application Publication US 2006/0134663 A1 - sequence listing, part 32

SEQ ID NO: 56991 - DNA, 2740 bp, Homo Sapiens
ggcggcggcggcggcggcgaagaactgttccttccacctcttcagccccggcaggacgggggcggccgccgcgaacccggggcggggacagcacgcagcctcgaggcgcgcacccccgcccggcagcggccccgacacccggggcgagcgggaaaacggcaacggcggcggcggcggcggcggcgggggaaggatgcaggggaagaagccgggcggttcgtcgggcggcggccggagcggcgagctgcagggggacgaggcgcagaggaacaagaaaaagaaaaagaaggtgtcctgcttttccaacatcaagatcttcctggtgtccgagtgcgccctgatgctggcgcagggcacggtgggcgcctacctggtgagcgtcctgaccaccctggagcgtaggttcaacctgcagagcgctgacgtgggtgtgatcgctagcagcttcgagatcgggaacctggcgctcatcctcttcgtgagctacttcggggcacgcgggcaccggccgcgcctgatcggctgcggcggcatcgtcatggcgctgggcgcgctgctgtcggcgctgcccgagttcctgacccaccagtacaagtacgaggcgggcgagatccgctggggcgccgagggccgcgacgtctgcgcagccaacggctcgggcggcgacgaggggcccgaccccgacctcatctgccgcaaccggacggctaccaacatgatgtacttgctgctcattggggcccaggtgctcctgggcatcggtgctacccctgtgcagcccctgggcgtctcctactacgacgaccacgtgcggaggaaggactcctcgctctatataggaatcctgttcacgatgctggtatttggaccagcctgcgggtttatcctgggctctttctgtaccaaaatctacgtggatgcggtcttcattgacacaagtaacctggacatcactccggacgacccccgctggatcggagcctggtggggtggctttctgctctgcggtgccttactcttcttctcttccctcttgatgtttgggtttccacagtccctgcccccgcactcagaccccgccatggaaagcgagcaggccatgctctccgaaagagaatacgagagacccaagcccagcaacggggtcctgaggcaccccctggagccagacagcagtgcctcctgtttccagcagctgagagtgatcccgaaggtcaccaagcacctgctctcaaaccctgtgttcacctgcatcatcctggccgcctgcatggagattgcagtggtggctggcttcgctgcctttttggggaagtacctggagcagcagtttaacctcaccacctcttctgccaaccagctgcttgggatgactgcgatcccgtgtgcttgtctgggtatcttcctgggaggtcttttggtgaagaagctcagcctgtctgccctgggggccattcggatggccatgctcgtcaacctggtgtccactgcttgctacgtctccttcctcttcctgggctgcgacactggccctgtggctggggttactgttccctatggaaacagcacagcacctggctcagccctggacccctactcgccctgcaataataactgtgaatgccaaaccgattccttcactccagtgtgtggggcagatggcatcacctacctgtctgcctgctttgctggctgcaacagcacgaatctcacgggctgtgcgtgcctcaccaccgtccctgctgagaacgcaaccgtggttcctggaaaatgccccagtcctgggtgccaagaggccttcctcactttcctctgtgtgatgtgtatctgcagcctgatcggtgccatggcacagacaccctcagtcatcatcctcatcaggacagtcagccctgaactcaagtcttacgctttgggagttctttttctcctccttcgtttgttgggcttcatccctccacccctcatcttcggggctggcatcgactccacctgcctgttctggagcacgttctgtggggagcaaggcgcctgcgtcctctacgacaatgtggtctaccgatacctgtatgtcagcatcgccatcgcgctcaaatccttcgccttcatcctgtacaccaccacgtggcagtgcctgaggaaaaactataaacgctacatcaaaaaccacgagggcgggctgagcaccagtgagttctttgcctctactctgaccctagacaacctggggagggaccctgtgcccgcaaaccagacacataggacaaagtttatctataacctggaagaccatgagtggtgtgaaaacatggagtccgttttatagtgactaaaggagggctgaactctgtattagtaatccaagggtcatttttttcttaaaaaaagaaaaaaaggttccaaaaaaaaccaaaactcagtacacacacacaggcacagatgcacacacacgcagacagacacaccgactttgtcctttttctcagcatcagagccagacaggattcagaataaggagagaatgacatcgtgcggcagggtcctggaggccactcgcgcggctgggccacagagtctactttgaaggcacctcatggttttcaggatgctgacagctgcaagcaacaggcactgccaaattcagggaacagtggtggccagcttggaggatggacatttctggatacacatacacatacaaaacagaaaacattttttaaaagaagtttcctaaaataaa

SEQ ID NO: 56992 - DNA, 4775 bp, Homo Sapiens; identical to SEQ ID NO: 22462

SEQ ID NO: 56993 - DNA, 1496 bp, Homo Sapiens
gcgagcgccgggaacgagcaccaccagggctggagcggacggctttagaagagcctagctgctgcgcgcgtcggagaggctcctgggaaactcccacggcccagggactttcgaaagcagagcgaggagccctcgcacgcgctagtctgcgagtgagcgctcagcccggcacctgttcctccagcgccgccgccttcccacccctcggacccgcgccgctcgcggcgcccgcccgttcctgcgatgaatccggccctaggcaaccagacggacgtggcgggcctgttcctggccaacagcagcgaggcgctggagcgagccgtgcgctgctgcacccaggcgtccgtggtgaccgacgacggcttcgcggagggaggcccggacgagcgtagcctgtacataatgcgcgtggtgcagatcgcggtcatgtgcgtgctctcactcaccgtggtcttcggcatcttcttcctcggctgcaatctgctcatcaagtccgagggcatgatcaacttcctcgtgaaggaccggaggccgtctaaggaggtggaggcggtggtcgtggggccctactgacccgccctctgcccccgcggcaaccgctcccacgcctgcccactttgctagcccggctgtgcccctcactatcagagactgggcgaagcaaacctgtcggagtcaattatttctctcgacttcggcctttcggaaagaagcgaccggtttctccctcgccctctgaaagtcctcatgcctggcagtcggaggagagcgcccagactctgaactcagcagaaagtggcaagaagagggcgattagggcgcagaactttggaagctgctacttacttggaatgcggggagaccgacggtgcgaaggcccttctccacccgcaggtgggccaagctctgggggcaggtggagagggcgggcaggggagagacccagcggcactgatcgccttgtgaccggaagagtgacctgttaaaagccacgcagcagactcatggggtctcacaaatccgtgtccgggtgcgctcccactcttctcctgctccccccctgccctggaggggaggggcgataaatacctttgattgtaacgtgccgttttaagaggttttgtgtttgtttgcttgaatacaaatgtttgataagtctttttctgccccagtggcctgtttgcctgcctgaggagttacagttttgtcattgtgggagaaggggtggggggagggggagcctgcgaatttgaacggggtgagttgtttcttttagtgcatttcccactgggtcttttgggaggcgtctagcgttcctgctggccctgggacaaagacccagaatagaactcgtagctcgtgactgcacggtttacgccacaaaagtgctcttgacatccgtgacaccgttttgactttttgtttttttcttatttaacatttccttaataaatgcaacatttaagcgtttaaaaaaaaaaaaaaaaaaaaaaaaa

SEQ ID NO: 56994 - DNA, 3946 bp, Homo Sapiens; identical to SEQ ID NO: 28403

SEQ ID NO: 56995 - DNA, 3197 bp, Homo Sapiens; identical to SEQ ID NO: 23150

SEQ ID NO: 56996 - DNA, 4793 bp, Homo Sapiens
attggatcaaacatgtcacaagagtcggacaataataaaagactagtggccttagtgcccatgcccagtgaccctccattcaatacccgaagagcctacaccagtgaggatgaagcctggaagtcatacttggagaatcccctgacagcagccaccaaggccatgatgatcattaatggtgatgaggacagtgctgctgccctcggcctgctctatgactactacaaggttcctcgagacaagaggctgctgtctgtaagcaaagcaagtgacagccaagaagaccaggagaaaagaaactgccttggcaccagtgaagcccagagtaatttgagtggaggagaaaaccgagtgcaagtcctaaagactgttccagtgaacctttccctaaatcaagatcacctggagaattccaagcgggaacagtacagcatcagcttccccgagagctctgccatcatcccggtgtcgggaatcacggtggtgaaagctgaagatttcacaccagttttcatggccccacctgtgcactatccccggggagatggggaagagcaacgagtggttatctttgaacagactcagtatgacgtgccctcgctggccacccacagcgcctatctcaaagacgaccagcgcagcactccggacagcacatacagcgagagcttcaaggacgcagccacagagaaatttcggagtgcttcagttggggctgaggagtacatgtatgatcagacatcaagtggcacatttcagtacaccctggaagccaccaaatctctccgtcagaagcagggggagggccccatgacctacctcaacaaaggacagttctatgccataacactcagcgagaccggagacaacaaatgcttccgacaccccatcagcaaagtcaggagtgtggtgatggtggtcttcagtgaagacaaaaacagagatgaacagctcaaatactggaaatactggcactctcggcagcatacggcgaagcagagggtccttgacattgccgattacaaggagagctttaatacgattggaaacattgaagagattgcatataatgctgtttcctttacctgggacgtgaatgaagaggcgaagattttcatcaccgtgaattgcttgagcacagatttctcctcccaaaaaggggtgaaaggacttcctttgatgattcagattgacacatacagttataacaatcgtagcaataaacccattcatagagcttattgccagatcaaggtcttctgtgacaaaggagcagaaagaaaaatccgagatgaagagcagaagcagaacaggaagaacgggaaaggccaggcctcccaaactcaatgcaacagctcctctgatgggaagttggctgccatacctttacagaagaagagtgacatcacctacttcaaaaccatgcctgatctccactcacagccagttctcttcatacctgatgttcactttgcaaacctgcagaggaccggacaggtgtattacaacacggatgatgaacgagaaggtggcagtgtccttgttaaacggatgttccggcccatggaagaggagtttggtccggtgccttcaaagcagatgaaagaagaagggacaaagcgagtgctcttgtacgtgaggaaggagactgacgatgtgttcgatgcattgatgttgaagtctcccacagtgatgggcctgatggaagcgatatctgagaaatatgggctgcccgtggagaagatagcaaagctttacaagaaaagcaaaaaaggcatcttggtgaacatggatgacaacatcatcgagcactactcgaacgaggacaccttcatcctcaacatggagagcatggtggagggcttcaaggtcacgctcatggaaatctagccctgggtttggcatccgctttggctggagctctcagtgcgttcctccctgagagagacagaagccccagccccagaacctggagacccatctcccccatctcacaactgctgttacaagaccgtgctggggagtggggcaagggacaggccccacagtcggtgtgcttggcccatccactggcacctaccacggagccgaagcctgagcccctcaggaaggtgccttaggcctgttggattcctatttattgcccaccttttcctggagcccaggtccaggcccgccaggactctgcaggtcactgctagctccagatgagaccgtccagcgttcccccttcaagagaaacactcatcccgaacagcctaaaaaattcccatcccttctttctcacccctccatatctatatctcccgagtggctggacaaaatgagctacgtctgggtgcagtagttataggtggggcaagaggtggatgcccactttctggtcagacacctttaggttgctctggggaaggctgtcttgctaaatacctccagggttcccagcaagtggccaccaggccttgtacaggaagacattcagtcaccgtgtaattagtaacacagaaagtctgcctgtctgcattgtacatagtgtttataatattgtaataatatattttacctgtggtatgtgggcatgtttactgccactggcctagaggagacacagacctggagaccgttttaatgggggtttttgcctctgtgcctgttcaagagacttgcagggctaggtagagggcctttgggatgttaaggtgactgcagctgatgccaagatggactctgcaatgggcatacctgggggctcgttccctgtccccagaggaagccccctctccttctccatgggcatgactctccttcgaggccaccacgtttatctcacaatgatgtgttttgcctgactttccctttgcgctgtctcgtgggaaaggtcattctgtctgagaccccagctccttctccagctttggctgcgggcatggcctgagctttctggagagcctctgcagggggtttgccatcagggccctgtggctgggtctgctgcagagctccttggctatcaggagaatcctggacactgtactgtgcctcccagtttacaaacacgcccttcatctcaagtggccctttaaaaggcctgctgccatgtgagagctgtgaacagctcagctctgagtcggcagactggggcttcctcctgggccaccagatggaaagggggtattgtttgcctcactcctggatgctgcgttttaaggaagtgagtgagaaagaatgtgccaagatacctggctcctgtgaaaccagcctcaggagggaaactgggagagagaagctgtggtctcctgctacatgccctgggagctggaagagaaaaacactcccctaaacaatcgcaaaatgatgaaccatcatgggccactgttctctttgaggggacaggtttaggggtttgcgttcgcccttgtgggctgaagcactagctttttggtagctagacacatcctgcacccaaaggttctctacaaaggcccagatttgtttgtaaagcactttgactcttacctggaggcccgctctctaagggcttcctgcgctcccacctcatctgtccctgagatgcagagcaggatggagggtctgcttctagctcagctgtttctccttgaggttgcggaggaattgaattgaatgggacagagggcaggtgctgtggccaagaagatctccgagcagcagtgacggggcaccttgctgtgtgtcctctgggcatgttaacccttctgtggggccaaaggtttgcatcgtggatccagctgtgctccagtctgtcccctcctcctccactctgactgccacgccccggaccagcagcttggggaccctccagggtactaatggggctctgttctgagatggacaaattcagtgttggaaatacatgttgtactatgcacttcccatgctcctagggttaggaatagtttcaaacatgattggcagacataacaacggcaaatactcggactggggcataggactccagagtaggaaaaagacaaaagatttggcagcctgacacaggcaacctacccctctctctccagcctctttatgaaactgtttgtttgccagtcctgccctaaggcagaagatgaattgaagatgctgtgcatgtttcctaagtccttgagcaatcatggtggtgacaattgccacaagggatatgaggccagtgccaccagagggtggtgccaagtgccacatcccttccgatccattcccctctgtatcctcggagcaccccagtttgcctttgatgtgtccgctgtgtatgttagctgaactttgatgagcaaaatttcctgagcgaaacactccaaagagataggaaaacttgccgcctcttcttttttgtcccttaatcaaactcaaataagcttaaaaaaaatccatggaagatcatggacatgtgaaatgagcatttttttcttttctttttttttttttttttttaacaaagtctgaactgaacagaacaagactttttcctcatacatctccaaattgtttaaacttactttatgagtgtttgtttagaagttcggaccaacagaaaaatgcagtcagatgtcatcttggaattggtttctaaaagagtaaggcatgtccctgcccagaaacttaggaagcatgaaataaatcaaatgtttattttccttcttatttaaaatcatgctaatgcaacagaaatagagggtttgtgccaaatgctatgaacggccctttcttaaagacaagcaagggagattgatatatgtacaatttgctctcatgttttt

SEQ ID NO: 56997 - DNA, 5293 bp, Homo Sapiens; identical to SEQ ID NO: 32076

SEQ ID NO: 56998 - DNA, 2037 bp, Homo Sapiens; identical to SEQ ID NO: 30740

SEQ ID NO: 56999 - DNA, 3320 bp, Homo Sapiens; identical to SEQ ID NO: 31508

SEQ ID NO: 57000 - DNA, 1726 bp, Homo Sapiens
gctaccgaggggctgtgggcgcgcagctggaacctccggctgtcagtgcgcttacagttcctaaccccgaccctgcgcgcagcccgcactatggcagccccgccgcagctaagggctctgctcgtagtcgtcaacgcactgctgcgcaagcgccgctaccacgctgcgttggccgtgcttaagggcttccggaacggggctgtctatggagccaaaatccgggcccctcacgcgctggtcatgacctttctcttccggaatggcagcctccaggagaagctgtgggccatactgcaggccacatatatccactcctggaacctggcacggtttgtgttcacctacaagggtctccgtgccctgcagtcctacatacaaggcaagacctacccagcacacgcattcctggcggccttcctcgggggtatcctggtgtttggagaaaacaataacatcaacagccagatcaacatgtacctgttgtcacgcgtcctgtttgccctgagccgcctggctgtagagaagggctacatccctgaacccaggtgggacccgttcccgctgctcactgcggtggtgtgggggctggtgctgtggctctttgagtatcaccgatccaccctgcagccctcgctgcagtcctccatgacctacctctatgaggacagcaatgtatggcacgacatctcagacttcctcgtctataacaagagccgtccctccaattaatgcagccctgaggtgtctggctgtggctcaagatttggccccatgcagaccctcccaaaggatactgccttctcaagatcataggcctcagactccaactggtgttatcccagggttccgtttgctgaagtaaaaacactgattttaaaatcccagtgggtacctttgtatggtggcacaagtggccgaatcaggctgaggaatctacggcttggttccagctgtgcagctgacttctgtgagactggggccagccacactactctctaggcctcaggggtcaaggagctcagaggagggccctgaggtctctttccggtgggtatgttcattcttcaactgttcttatgtcacagagggctccttgctggtgggcagtgggttgtaaatactttttaaaaaacactaagttccttatctcagatgctgttctactggagaagttctagattcccactgtccaatagaaacacgtgagccatatatgtaattaaaatgtttctagtagctgcattacaaaaaagaagcctgggcactgtggctcactcctgtaatctcagaactttgggaggctgaggcaggtggatcacttgagctcaggagcttgagaccagcctgggcaacatggtgaaacccagtttctacaaaaaatacaaaaaattagccgggttccatcacctgtggttccagctgaggtgggaggatcacttgagcctatgaggtcgaggctacagtgagcaaagatcacgccactgcactccagcctgggcgacagtgagaccctgtctcaccaaagaaaaaaaaaaggtgagattaatcttcactatatattttaacacaaatttctaaaagttatttcaacatataattaacatcattagatattttgtactcttttttgtattaagtattcaaaattgggtgtatattttgccacccacattttcaggacccagtagccacatgtggctagtggctgctgtgacgggcaacacag

SEQ ID NO: 57001 - DNA, 2211 bp, Homo Sapiens; identical to SEQ ID NO: 26924

SEQ ID NO: 57002 - DNA, 1466 bp, Homo Sapiens
gagaatgaaagtggatgcccgcgaatcccggaagtcagactgtttttttcagttccctggaggctttttgatactgattcgcgtacacctgttgtttgaaagctctcagcgggacaatgctgacccagctgaaagcaaaatcagaggggaagcttgcaaaacagatttgcaaagttgtgttggatcattttgaaaaacagtattccaaagaactcggagatgcctggaatacagtaagggagatactaacatctccatcatgctggcaatatgctgtcctgcttaaccgattcaattatccttttgaactggaaaaggatttacatttgaagggctatcacacactctctcagggatctttacccaactatcctaaatcagtgaagtgttaccttagcagaactccgggccgaatcccttcagaaagacaccaaattggaaacctgaaaaaatattatctcctaaatgctgcttctcttctcccagtgttggctctggaattaagggatggggagaaggttctggatctctgtgctgctcctggagggaaatcaatagctctgctgcagtgtgcttgtccaggttatcttcattgtaatgaatatgatagtctgagattgaggtggctaaggcagacgttggaatctttcatcccacagcctttgataaatgtaattaaagtgtctgaattggatggcagaaaaatgggagatgcccagcctgaaatgtttgacaaggtgttagtggatgctccgtgttcaaatgatcgaagctggttgttttcttctgactctcagaaggcatcctgtaggataagtcaaaggaggaatttgcctcttctacagatagagctgttaaggtctgcaattaaggccttacgtcctggagggatacttgtatactctacatgcacgctttccaaggcagaaaatcaagatgtgatcagtgaaattttaaactcccacggtaacatcatgcctatggacattaaaggaatagcaaggacttgctcccacgacttcacatttgctcccactggccaggaatgtgggctcttagtgattccagataagggcaaagcctggggcccaatgtatgtagccaaattgaagaaatcatggagcacaggaaaatggtgacatgaatttgtaaactgtgtttatgtgttattatatttatatttctgaactcagtacatgttaatatttaaataattatgcagtaactttctctgggtctgtttggaatcctatttagttaatactttagcatcttagaatctaggcttgagaattgttcaggtgtatttttttcctagaaatatatctgtaacaatgatttaaggtggtgcagatggtgtttgttctatattataaatctgctgtctttgcttggcattttatagttaaattaattagaatatgtggttttatgctaaaaaaaaaaaaaaaaaaaaaaaaaaaaaa

SEQ ID NO: 57003 - DNA, 3026 bp, Homo Sapiens; identical to SEQ ID NO: 30742

SEQ ID NO: 57004 - DNA, 2469 bp, Homo Sapiens; identical to SEQ ID NO: 30704

SEQ ID NO: 57005 - DNA, 7816 bp, Homo Sapiens; identical to SEQ ID NO: 31149

SEQ ID NO: 57006 - DNA, 4023 bp, Homo Sapiens; identical to SEQ ID NO: 30712

SEQ ID NO: 57007 - DNA, 2854 bp, Homo Sapiens; identical to SEQ ID NO: 31710

SEQ ID NO: 57008 - DNA, 4183 bp, Homo Sapiens
gtagccgacaggccagagtttccagtttcggtggcttcgtaggcttttagcttctgaaatccgctaaaagcggcggttcattcatcttcaagtacctagcctgactggtagggctgctcagcattccgaaacatttcgacctggggaggggggcggcggtgaaagaatactttctgtagagagtgcccctcgcgtcgcccctgctttgaaggctttatgtattaacggaatgccgaacatttgtgtcctacttgctgacagcgcacaggatccttctaacagtatttctcaagtacttaacaaaaagatgaaaacttgaagtccaagccgtgctgctgattccgtctcacagtttaaagactgtccagaaactttaagctttcaaaactgtacattttaaaatcctgtgcgtttatcttcattttgctgggcagaaagccaaagtactggactgcctggttcagggctgaacgcctagtacacctgctaacttggagcttcagagccatggcaaccaaggagtcaagagacgccaaagcacagttggccctctcctcatcggccaatcagagcaaggaagtgcctgaaaacccaaactatgctctcaaatgtactcttgtgggacacacggaagcagtgtcatcagttaagtttagtcctaatggagaatggctagcaagttcttctgctgataggctaatcataatttggggagcatatgatggaaaatatgagaaaacactctatggtcataatttggaaatatcggatgttgcctggtcatcagattccagtcgtcttgtttctgcctcagatgataaaactctaaaattatgggatgtgagatctggaaaatgtttgaaaacactgaaggggcacagtaattatgtcttttgttgtaacttcaatccgccatccaaccttataatctcgggatcttttgatgagactgtaaaaatatgggaggtgaaaacaggaaagtgtctcaagactttgtctgctcattctgacccagtttctgctgttcattttaattgtagtgggtccttgatagtgtcaggtagctatgatggcctctgtagaatctgggatgctgcatcaggtcagtgtttaaaaacgctcgttgatgacgataaccctcctgtctcttttgtaaaattttctccaaatggtaaatacattctcactgcaactttggacaacactcttaaactatgggattatagcagaggcaggtgcctgaaaacatacactggtcataagaatgagaaatattgcatatttgccaatttttcagttactggtggaaagtggattgtgtctggttccgaggataacctggtttacatttggaaccttcagactaaagagattgtgcagaaattacaaggccatacagatgttgtgatctcagcagcttgtcatcctacagaaaacctcatcgcatcagcagcattagaaaatgacaaaacaattaaactgtggatgagtaaccactaatccctttgaaaatcaagtagtagagccaagttggccaaaaaacttggatatttaaaaagacggtttcttttaattttggcagtttggtattttaaaaattgtctattgttaaattttgagattcatacactacatttacaaaatgagatagttgaaaaagcacatctagaattcagcttctgactaccaatcttttttgagcaactttttgtaatttttatggatttatgtcacttttattacagggatatattgcatagtggtgaaatctgggcttagtataccctcacccaaatagtatacattgtacctagtaaatactttcccatctctcaccccactcccacctttgaaggctctagtgtctatgattctgctctccacgtccaggtgtacacattgtttatctcccacttacgagaacatgtggtttttgactttctgtatcattacttcacttaatggcctccaggtccatccatgttgttgcaaaagataagatttcattatttttttttggctgagtagtattctgtggtgtgtatgtgtgtgtgtgtatgcatatatgtgtatgtgtatgtatataagtatatacaccacattatccagtcatctggatatgtatataagtatatacaccacattttctttatccagtcatctcttgatggacccttaggttggttccataactttgctattacgaatagtgctgcgataaacagcactattatgaatagtgctgcgataaacagtgcaggtgattttaaaatataatttcctttgggtagatacctactagtgggattgctggatcgaatggtagtttttagttggaaaatctccatactgttttccagaggttgtaaaatgtacattcctccccacagtgtataagctgtgcctttactctgcatctttgccatgattctttttgagacagagtctctggtgcccaggctggagtgcagtggcacaatcttggctcactgcaacctctgcctcccgggttcaagcagttctcatgtctcaacatcccaggtagctaggattacaggcgtgccaccatgcctggctaatgtttctatttttagtagagacagggtttcaccatgttcgaggctggtcttgaactcctggcctcaagtgatccacctgcctcggcctcccaaagtgctgggattacaggcatgagccactgtacccagccattttttgactttttaataatagccattctaactggtttaagagagtatctcattgtggttatattttgtattcctctgatgattagtgatgttgagcatttttttgtgtgtgtttgttggccacttgtatgtcttctttgaaaactgacttctaatcttgaggcctattaataatttcatttgtctgtcactggacaatttctcattcctctcagtgactatcctagaggatcagtgtatttgagaaatatttagaagtaaagttgacaggacaggatgattgattaaaagaggggagcaagggaatttgaaataattccagggtttctggtttgggagatcagatgaacaagtgcataagcctgggatgctggtggaggactggagagacatggcagatgctacctgcacacttttggtaatattctgtgtgatgggatatgaaatggtccatagaaaaaaaccggaaaaatacgccaaggttaggttcattctaagagtctaaaaatttcaaaaaccaaaacaacattataaatggtgtttctcaaggacctttcactacctttttagattgtgcttgtgattttcaggcaagctaaatgtctgatgaagactgctcttcttttgttctgtgtctgacctactaattcctgcccatgcttcaaactcagttcagaaatcactgaaggaaccatccactgccggcctgcctgcaaccacagctgacagctgagttagttaggttttcctgtccctattatttaccagtttgtactgaaatgctttcatgggctgtgcttccagattatgagttctgtggaatcaggaagtatgtctctgtattcttgtattctttggcttttttgtgtagtaaagggactcaagtaatgtttgacagtgaaggatacaacttcattccttgcctgctttgataaattttagtaataaattcccaaaactatcatgttgattaaaaataaaaagtaaccgtaacctcacacattaactttattcaaacaaacagcacttacaggaaatgtaaagtagaaaaagatttctgcccactttacctacggagacatgataaacacgcaaaaaaaacctagaaattaagcaaaaaatagcacaataatttaactgaaagcaacaagggcaaaactgtctccttttgtagtttgtggtaccttatagtagtgctcattcagtttcgtttgcttgataaatctgaggactatgagatatcagagttactagtagggtaggagtgctgtaagggtactgggagaagtaggattagttaggggcagatcttgaattctggccaagaaactgatatttaacccataaagagatagtcactatatgttatcaaataggagaataacacaaatgagaaatgactgttaattcctgatgcataataacagttgtgagctttagtttaatgtaatatttgtaataaaaacgtttgg

SEQ ID NO: 57009 - DNA, 1508 bp, Homo Sapiens
gctggaggagcctcgaggctgaggctgccggggggctgtgggctaccgggccgccggcgcctcagcgatgttttactcagggctcctcactgagggcggccgcaaggagaccgacatgcgggaggcggcgtcactgcgacagcagcgccggatgaagcaggcggtgcagttcatccacaaggactccgccgacctgctgcccctggacggcctcaagaagctgggctcgtccaaggacatgcaacctcataatattctgcagaggcgcctcatggaaaccaacctgtctaagctccgaagcggtccccgtgtcccttgggcctctaagacgaacaaactcaatcaggctaagtctgaggggctaaagaagtctgaggaggatgacatgattttggtttcttgccagtgtgctggaaaggatgtgaaagccttggttgacacaggctgcctatataatctcatctctttggcctgtgtggacagattgggactcaaggagcatgtcaaatcccacaagcatgaaggagaaaagctttctctaccccggcatctcaaagtagtgggccagattgagcacctagtgatcacactgggctccctccgcctggactgcccagcagctgtggttgatgacaatgagaaaaacttgtcccttggtctacagactctccgatctctgaagtgcatcataaacttggataagcaccggctgatcatggggaagacagacaaggaagaaatcccttttgtggagacagtctctttgaatgaagacaacacttcagaagcataactacagcctgcagcatgtctgcacgtgtgcatgcatacacaccgggttgacagattgagaaaactgggtttgaaccaaatgccgtagtgacttgctgtggaccaagtccttccatctaatagaagctccaggggctccttcccattcagacctctctagactatagtctatgcttagagatcttgtctggttatggccattgttttttactactttgatcacttaacttatagaccttttttgacactgccagtctcacttgtggcctatttctctgcttcttccaggaatttgcttttattagtcaagtataggggctgccaggttctgtgtctccatagatatatgtgcttcttttcctatagctaaatgtataataaacaggaacctgacctttacctcctttcagctgtttcaaacaggtgccaggatacctatgtcttagaattagagtttcttcaaattgattcattgatttctcaagtatggattatgtgaaagagcccagggacattatccattacagtctaactctttcatttaaaggtccagagaggcaagtgaattgtctaagttcatatattaggtcagtgactgaagggaccaagaacgcagacctgatttccaagccaagactcccatgctgcctcatttgtattcaagcctttaacaggagggcaaagaggtgagaatgtgttaaaaaaaaaaaaaaaaa

SEQ ID NO: 57010 - DNA, 5274 bp, Homo Sapiens
gcaggtggggccgccgcggaactccaggtccggccgggagcagaggggcgggggcgagagggaagtgggcgggagccgcgatctgagtagccagcgtcgccggcgaccgcggagttctgggctagtgggaccccgcgcgggctggttcgggatgagcgatggcatcggtcaaggtggccgtgagggtccggcccatgaatcgcagggaaaaggacttggaggccaagttcattattcagatggagaaaagcaaaacgacaatcacaaacttaaagataccagaaggaggcactggggactcaggaagagaacggaccaagaccttcacctatgacttttctttttattctgctgatacaaaaagcccagattacgtttcacaagaaatggttttcaaaaccctcggcacagatgtcgtgaagtctgcatttgaaggttataatgcttgtgtctttgcatatgggcaaactggatctggaaagtcatacactatgatgggaaattctggagattctggcttaatacctcggatctgtgaaggactcttcagtcggataaatgaaaccaccagatgggatgaagcttcttttcgaactgaagtcagctacttagaaatttataacgaacgtgtgagagatctacttcggcggaagtcatctaaaaccttcaatttgagagtccgtgagcatcccaaagaaggcccttatgttgaggatttatccaaacatttagtacagaattatggtgacgtagaagaacttatggatgcgggcaatatcaaccggaccaccgcagcgactgggatgaacgacgtcagtagcaggtctcatgccatcttcaccatcaagttcactcaggctaaatttgattctgaaatgccatgtgaaaccgtcagtaagatccacttggttgatcttgccggaagtgagcgtgcagatgccaccggagccaccggggttaggctaaaggaagggggaaatattaacaagtccctcgtgactctggggaacgtcatttctgccttagctgatttatctcaggatgctgcaaatactcttgcaaagaagaagcaagttttcgtgccttacagggattctgtgttgacttggttgttaaaagatagccttggaggaaactctaaaactatcatgattgccaccatttcacctgctgatgtcaattatggagaaaccctaagtactcttcgctatgcaaatagagccaaaaacatcatcaacaagcctaccattaatgaggatgccaacgtcaaacttatccgtgagctgcgagctgaaatagccagactgaaaacgctgcttgctcaagggaatcagattgccctcttagactcccccacagctttaagtatggaggaaaaacttcagcagaatgaagcaagagttcaagaattgaccaaggaatggacaaataagtggaatgaaacccaaaatattttgaaagaacaaactctagccctcaggaaagaagggattggagttgttttggattctgaactgcctcatttgattggcatcgatgatgaccttttgagtactggaatcatcttatatcatttaaaggaaggtcagacatacgttggtagagacgatgcttccacggagcaagatattgttcttcatggccttgacttggagagtgagcattgcatctttgaaaatatcggggggacagtgactctgatacccctgagtgggtcccagtgctctgtgaatggtgttcagatcgtggaggccacacatctaaatcaaggtgctgtgattctcttgggaagaaccaatatgtttcgctttaaccatccaaaggaagccgccaagctcagggagaagaggaagagtggccttctgtcctccttcagcttgtccatgaccgacctctcgaagtcccgtgagaacctgtctgcagtcatgttgtataaccccggacttgaatttgagaggcaacagcgtgaagaacttgaaaaattagaaagtaaaaggaaactcatagaagaaatggaggaaaagcagaaatcagacaaggctgaactggagcggatgcagcaggaggtggagacccagcgcaaggagacagaaatcgtgcagctccagattcgcaagcaggaggagagcctcaaacgccgcagcttccacatcgagaacaagctaaaggatttacttgcggagaaggaaaaatttgaagaggagaggctgagggaacagcaggaaatcgagctgcagaagaagagacaagaagaagagacctttctccgcgtccaagaagaactccaacgactcaaagaactcaacaacaacgagaaggctgagaagtttcagatatttcaagaactggaccagctccaaaaggaaaaagatgaacagtatgccaagcttgaactggaaaaaaagagactagaggagcaggagaaggagcaggtcatgctcgtggcccatctggaagagcagctccgagagaagcaggagatgatccagctcctgcggcgtggggaggtacagtgggtggaagaggagaagagggacctggaaggcattcgggaatccctcctgcgggtgaaggaggctcgtgccggaggggatgaagatggcgaggagttagaaaaggctcaactgcgtttcttcgaattcaagagaaggcagcttgtcaagctagtgaacttggagaaggacctggttcagcagaaagacatcctgaaaaaagaagtccaagaagaacaggagatcctagagtgtttaaaatgtgaacatgacaaagaatctagattgttggaaaaacatgatgagagtgtcacagatgtcacggaagtgcctcaagatttcgagaaaataaagccagtggagtacaggctgcaatataaagaacgccagctacagtacctcctgcagaatcacttgccaactctgttggaagaaaagcagagagcatttgaaattcttgacagaggccctctcagcttagacaacactctttatcaagtagaaaaggaaatggaagaaaaagaagaacagcttgcacagtaccaggccaatgcaaaccagctgcaaaagctccaagccacctttgaattcactgccaacattgcacgtcaggaggaaaaagtgaggaaaaaggaaaaggagattttggagtccagagagaagcagcagagagaggcgctggagcgggccctggccaggctggagaggagacattctgcgctgcagaggcactccaccctgggcatggagattgaagagcagaggcagaaacttgccagtctgaacagtggcagcagagagcagtcagggctccaggctagcctggaggctgagcaggaagccctggagaaggaccaggagaggttagaatatgaaatccagcagctgaaacagaagatttatgaggtcgatggtgttcaaaaagatcatcatgggaccctggaagggaaggtggcttcttccagcttgccagtcagtgctgaaaaatcacacctggttcccctcatggatgccaggatcaatgcttacattgaagaagaagtccaaagacgccttcaggatttgcatcgtgtgattagtgaaggctgcagtacatctgcagacacgatgaaggataatgagaaacttcacaatggcaccattcaacgtaaactaaaatatgagcggatggtttctcgctctttgggcgcaaatccagatgacctgaaggacccaattaaaattagtatcccacgctacgtcctctgcgggcaaggaaaggatgcacacttcgagtttgaggtcaagattactgtcctagatgagacatggactgtattcaggcgttacagtcgttttcgagaaatgcataaaacattgaagttaaagtatgcagagcttgctgcccttgaatttcctccaaagaaactatttggaaataaggatgaacgtgtgattgctgagagacgaagtcacttagagaaatacctcagggactttttcagcgtgatgctccagtccgcaacatctcccctccacatcaacaaagtgggactgactctctcgaaacataccatttgtgagttttcaccattcttcaagaaaggagtctttgactacagcagccacgggacggggtagagccaggggtgatggaggaaccaccacagcagtgccttctcgtcgaagcgggctccgatgcagggcagctcccccatgcgaggatccgggtctgcctcctcctgctgaagacagacatgcagcagcgggcccgggccacctcacgtttccatacctagtgcctgagtttggggatgggatgctctgcctgctgatgtggccctgacaggcagccgttaccgttccattgcggttgaacgtggccttttcccacagtgcttccttctcactgcgcagcaaagttcgtcccctgtggcaagatagatgtggttgggccatcgtgggttccctgagcccagccagcctgggacctcccaaagtgggtggcttaccagaccacccttaaatgactttcatctggtttcctctttcaccaaaatatactcgtattttttatatttcttccatgtggctggctatattccaagaaaagcattttaaattatttcattgtatttttttctttttttccctcatttgaatcagaacttttatataaaacccaaacactgatgtttacacagaatttcatattctgcaaaagggattttttgatccaatcatgactgtagtcttccatgcttgacaaattggatgtagacaacattacttaaaacttctataaatccctacaattaggatatttatttaaccttgaatattcaagaacattctcccaaatctaaatggctactgtgcattcttgagctttttctgctaagcacaaaatgaacgcaaagctaaatgcatatttttaagtattattcacattttttgttacagaatctattggatctttggctggaaaactagaatttatagcagtttattaatgataccttaaattactcaggacttaatgtagcattgcacttctgtgtacagtaaaactgctttgttttactaaagagaaaaatgtgagtggaaaaaatatgtatgtggtatatactcaaatgtatataattctatctatagatttatatatgtatacattctgtacagtagttccatcaaaatatgtaataattcacaccaattttattaaatgtatttgctttttcaaaatttaaattgagctgctatcaatattaaatgaagttatggcatctaaaaaaaaaaaaaa

SEQ ID NO: 57011 - DNA, 2315 bp, Homo Sapiens
gtgcagccgcgggtgcaggagtcctggggcatggcgggggcggggcagggggaggcgcgcacagaacaggctggggcatccctcgccctggctctttgagcccggaccagacaggtgctgggaatacagcaaggaattagaccagttccctgctctctggtatggtgggacagatactaaaaagagatgtgataatggatcatcatgtttctaccatcaagcctcgaagaatccaaaaccaaaatgtcattcaccgcttggaacgccggcggatcagttcaggcaaggcaggtacccactggcaccaagtccgagtgttccatcagaatgtcttccccaacttcacagttgtcaacgttgaaaagcctccttgtttcttgcgtaaattctcacctgatggacgctactttattgctttttcttcagaccagacatctcttgaaatctatgagtaccagggctgccaggcagcagaggacctactgcagggatacgaaggagaaatcctgtccaatggcaatgaccagcggtcagtgaatatccggggccggctctttgaacgcttttttgtcctgctgcacattaccaatgttgcggccaatggtgagcacctgaaccgggagtgtagtctcttcactgatgactgccgctgtgtcatcgtgggctcagctgcctacctcccagatgagcctcaccctccattttttgaggtatatcggaacagtgaatcagtgacccccaacccacggtcccctctagaagactattccctccatatcattgaccttcacaccggccgcttatgtgatacacgcacgttcaagtgtgacaaggtggtcttgtcacacaaccaagggctgtacttgtacaaaaacatcctggccatcttgtctgtgcaacaacagaccatccatgtcttccaggtgactcctgaaggcactttcattgatgtgcggaccattggccgcttttgctatgaggatgacctgctcactgtgtcagctgttttccctgaggtacagcgggacagtcagacaggcatggccaatccctttagggatcctttcatcaattccctcaaacaccggttgctggtatatttgtggcgccgggcagaacaggatggtagtgcaatggccaagaggcgcttcttccagtattttgaccaactgcggcagctgcgaatgtggaaaatgcagcttctggatgaaaaccacctgtttatcaagtacactagtgaggatgtagtaacactgcgagtcacagatccatcacaggcatctttctttgtggtgtacaatatggtgacgacagaggtgattgctgtgtttgagaatacatcagatgagcttttggagctctttgagaacttctgtgacctttttcgtaatgctaccctgcacagtgaagttcagtttccctgctcagcttctagcaacaattttgcaaggcagatccagcgccggttcaaagacactattataaatgccaagtatggagggcacacagaggcagtacgccggctgctgggtcagctccccatcagtgctcagtcttacagcggtagcccctatctggatttgtctctcttcagttatgatgacaagtgggtatctgtcatggagcggcccaagacttgtggagatcacccaatcaggttctatgcccgggactcgggcctgctcaagtttgagatccaggcggggttattgggccgccccatcaaccacacagtgcgacgccttgttgccttcacctttcacccttttgagcctttcgctatttctgtgcagaggactaatgctgagtatgttgtcaacttccatatgcgacactgctgcacgtaggtgcctcaccagagccagattatctggtcttccaagactttgccactcacttatctcagtggactccaaagcaaaagctcccgactactagctctgttagttccagcctgctatacctcagatgggagagagccagagagaggagtgagggtggctcaacctaatggaatttttaaattgtatacaatactgctactgattgttataatatcctcttgcgttttccctgtgggaatgcccagcattaattaagtccatttcatttttgctttactttgcatttgattgctgtgaagatgaaagcattagacttttatccccttcatgtcacttcttcggcattatggtttgcatctgaaagcagttaaatcttgtttactgatgagaatgacatacatcctttccatttagctcataagcacggctatctttttaagagaaaaataaagccatggtattttcatactt

SEQ ID NO: 57012 - DNA, 1935 bp, Homo Sapiens
atgtggtcagtgctccagcaggcagctgccaactgtgcctttgccttcacttcttacttgcacacagccacaaagccagccagaggtgagggccagggcagctcaggttcctctcgggcacacacacagctctgtgcctgtgtgggcacagccttccatgcctccaggagtgtggcagagcttctcagcggccactgtgggcatctcgttcctcagatcttcctttcatgagttatgtagttgaattatcaatctttcttggcttctaagttttgtgttctacttagaatgctcttcccccttaaagattatatttgaaatgttttccatgttttcttctagtacttttatgggtttcattttcatattgaaatcattgatctacttctagtttttgatacaaaatgtgagccaggaaacccagtttttaaatttcaaatagctgtccaggtgtccctgcacctcttatgcatgagccctcgctttgtgccaatgtggagtgcccgcctgctcacacgtgcccatgtggagtgcccgcctgctcatgtgcccatgtggagtgcccgcctgctcacacatgtcgatgcggagtgcccgcctgctcacacatgcccatgtggagtgcccgcctgctcacacgtgcccatgtggagtgcccgcctgctcacacacgtgtccatgtggagtgcccacctgctcatgtgcccatgtggagtgcccacctgctcacatgtgccgatgtggagtgccacctgctcacacacgtgcccatgtggagtgcccgcctgctcacgtgcccatgtggagtgcccgcctgctcacacgtgccgatgcggagtgcccgcctgctcacacgtgcccatgcggagtgcccgcctgctcacacgtgcccatgcggagtgcccgcctgctcacacgtgcccatgcggagtgcccgcctgctcacacgtgccgacgtggagtgcccgcctgctcacacgtgcccatgtggagtgcccgcctgctcacacgtgccaacgtggagtgcccgcctgatcacacgtgcccatgtggagtgctcgcctgctcacacgtgccgatgtggagtgcctgcctgctcacacgtgcccatgtggagtgttcgcctgctcacacgtgccgatgcggagtgcccgcctgctcacacgtgccgatgcggagtgcccgcctgctcacacgtgcccatgtggagtgcccgcctgctcacgtgccgatgtggagtgcccgcctgctcacacgtgcccatgtggagtgcccgcctgctcacgtgccgatgtggggtgcccgcctgctcacatgtgccgatgtggagtgcccgcctgctcacacgtgcccatgtggagtgcccgcctgctcacacgtgccgacgtggagtgcccgcctgctcacgtgcccatatggagtgcccgcctgctcacacgtgccattgtggagtgcccgcctgctcacacacatgccgatgtggagtgcccgcctgctcacacgtgcccatgtggagtgcccgcctgctcacacgtgcctatgtggagtgcccgcctgctcacacacgtgcccatgtggagtgcccgcctgctcacacgtgcccatgtggagtgcctgcctgctcacacacgtgcccatgtggagtgcccgcctgctcacacaaagccctggcatggtggttctgtaggtttcctgtcctgccggccgagtcagacgctgttaccgtacattctactcatggtggctttttaatacgtttttatgtcaaggatcccttttatatttctctgcacctcgagataacgtaggaatattagggatgagatggaagaggagagggtgtttttgtaaaattgaattcaggactgatttgttagcctggtgcttttcgtatcagaccttttaatgaattttcatggatgctgattaaaagac

SEQ ID NO: 57013 - DNA, 1364 bp, Homo Sapiens
atgtacgcctttgtgcggttcctggaggacaacgtctgctacgcgctgcccgtgtcgtgcgtgcgcgacttcagcccccgctcgcggctggattttgacaaccagaaggtgtacgccgtgtaccggggcccggaggaattgggcgccgggcccgagagccccccgcgcgccccccgcgactggggcgcgctgttgctccacaaggcccagatcctggcgctggcagaagacaaatctgaccttgaaaacagtgtgatgcagaagaaaataaaaatccccaagctttctcttaatcatgtagaagaagatggagaggttaaagattatggggaagaagatttacagcttagacacatcaaggattgtctggggaaatattgatctgcagtccaagaaaatcccagctgcccttgcctgaactgattctcgttgtcctacacagagacctgaggggcggaagccgagcgaagtggcgcacaagagcatcgaggcagtggtggctcggctagagaagcagaacggcctgagcctgggccatagcacgtgtccggaagaggtcttcgtggaggcctcgccaggcacagaggacatggacagtctagaagatgctgtggtgccccgggctctgtatgaggagctgctgcgcaactaccagcagcaacaggaagagatgcgccacctccagcaggagctggagcggactcggaggcagctggtacaacaggccaagaagctcaaggagtacggggcacttgtgtctgaaatgaaggagctccgtgaccttaaccggaggctccaggacgtgctgctcctgaggcttggcagcggtcccgccattgatctggaaaaagtaaagtcagaatgtctcgagcccgagccggagttacggagcactttcagtgaggaagcaaatacgtcgtcctattaccccgctcctgcgcctgtcatggacaagtatatcctagacaatggcaaggtccatctgggaagcgggatttgggttgatgaggagaaatggcaccagctacaagtaacccaaggagattccaagtacacgaagaacttggcagttatgatttggggaacagatgttctgaaaaacagaagcgtcacaggcgtcgccacaaaaaaaaagaaagatgcagtccctaaaccacccctctcgcctcgcaaactaagcatcgtcagagagtgtttgtatgacagaatagcacaagaaactgtggatgaaactgaaattgcacagagactctccaaagtcaacaagtacatctgtgaaaaaatcatggatatcaataaatcctgtaaaaatgaagaacgaagggaagcaaaatacaatttgcaataaactttggatttttcat

SEQ ID NO: 57014 - DNA, 2606 bp, Homo Sapiens
aggacgccactgccctgtcgccccgcctgtgcagcccaggacctaggcgcggtagctggggctggcttttgaggggcgcgggcagccttctgactgggtcggaggcctgcgggcccgaagcctctgtccctcctgttcttgtccggcgctgcttagcccctccgcgtagtcatcatggatctgattttaaaccgaatggattatctgcaggtgggagtaacatctcagaagactatgaagctaattcctgcctcaagacacagagctacacaaaaggtggttattggagatcatgatggggtagttatgtgctttggcatgaagaaaggagaagcagcagcagtgttcaagactttacccgggccgaagattgcaaggctggaactgggaggggttatcaacacacctcaggagaaaatttttattgctgcagcatctgagattagaggcttcacaaaaagaggaaaacagttcctctcctttgaaacaaacctcactgaaagcattaaagctatgcacatatctggctcagacctctttctcagtgcaagttacatctataaccattattgtgactgcaaagaccaacattattacctttctggggataaaatcaatgatgtgatctgccttccagtggaaagattatctcgtatcacacctgtattggcctgccaggacagagtgctcagagttttacagggatctgatgtgatgtatgcagttgaagttcctggaccccctactgtcttagcactacacaatggaaatggcggtgactctggagaagaccttttgtttgggacatcagacggaaaacttgcgcttatacagattactacatccaaaccagtacgcaagtgggaaattcaaaatgagaaaaagagaggaggtattttgtgtattgacagctttgacattgtgggtgatggggttaaagatttacttgttgggagagatgacggaatggtggaagtgtatagttttgataatgcaaatgaacctgttctacgatttgatcagatgttgtctgaaagcgtcacatctatccagggtggttgtgtaggaaaagacagctatgatgaaatcgtggtgtccacatattcaggctgggttacaggtctgacaacagagcccattcataaggaaagtggaccaggagaagaactaaaaattaatcaggagatgcagaataaaatttcttccttacggaatgagttggaacatttgcagtataaggtattgcaggaaagagagaattatcaacagtcttctcaatcaagcaaagcaaaatcagcagtaccttcctttggtataaatgataaatttacactaaataaagatgatgccagttacagccttatcttagaggtacagactgcaatagataatgtcttaatacagagtgatgttccaatagatttacttgatgtggataaaaattctgctgttgttagctttagcagctgtgattctgagtcaaacgacaacttccttcttgccacttatcggtgccaggcagatactacaaggctggaactcaagattcgctcaattgaaggccagtatggcacactacaagcatatgtgactccaagaattcaacccaaaacctgtcaggtccgccagtaccacatcaaacctctttcactccatcaaagaactcactttattgatcatgacagacccatgaatacactgaccctaacaggccagttcagttttgctgaagttcactcctgggtggttttttgtctgcctgaagttccagaaaaacctccagcaggagaatgtgtgacattttactttcagaacacctttctagatacacaacttgaaagtacctacagaaaaggagagggagtttttaaatctgacaacatttctactatctccatcctaaaagatgtgctttctaaagaagctacaaaaaggaaaattaacctcaacatatcatacgagataaatgaagtatcagtcaaacacactttaaagctaatccacccaaagctggagtaccagttgcttttggctaagaaagtgcagttaattgatgctttaaaagaattacagattcatgagggaaatacgaactttctgataccagaatatcactgtattctagaagaggcagatcacctacaggaagaatacaaaaagcaacctgcacatcttgaaagactctatggttagtggaccattctagaataccttgccatatttcttttcaactggctatttcccaaggatcatgtaagagaagctgggcagaaagataaaaagattacatcagtcatgattcatgaaccagtcatgaatcagttgacaacaaatttattgcacagaatatttctgtattttgtcaagctacttttaatatttaattcttttacttgataaaatgcaagtatattaagaaataagtatactgtgatgaattaatctatatatatgaacaaacctggtataaaatgaatgtaatctatgaacctttagagcttagactgtatttcacacaaataattgtcatgttttgttgctattgtgaattataaaaatgcagcatttaaaatttttaaggcaaaatttaataaaggatatacagt

SEQ ID NO: 57015 - DNA, 6140 bp, Homo Sapiens; identical to SEQ ID NO: 23673

SEQ ID NO: 57016 - DNA, 2178 bp, Homo Sapiens; identical to SEQ ID NO: 30272

SEQ ID NO: 57017 - DNA, 6376 bp, Homo Sapiens; identical to SEQ ID NO: 29932

SEQ ID NO: 57018 - DNA, 2244 bp, Homo Sapiens
gggaaggagatgcctcttccttcccttcaatagtgggttaaacccagctggcaccctctggaactacgggaacaatattcttcaagagaaggtcactctaccaaagccaggagcacagtattctcaggatctcaacaaggaagagcagaccaaggttgcttctgattccttacaaccttccgtaattccaggcttgtggccccaaattcagggccccacccttccaggaacaaatcattatagtaataatttgccttcatcttccatataccaactaagcatgtttaactacgaacgtccaaaacacttcatccagtcccaaaacccatgtggctccagattgcagcctcctggaccagaaacctccagcttctctagccagaccaaacagtcttccattatcatccagccccgccagtgtacagagcaaagattttctgcctcctcaacactgagctctcacatcaccatgtcctcctctgctttccctgcttctccccagcagcatgctggctccaacccaggccaaagggttacaaccacctataaccagtccccagccagcttcctcagctccatattaccatcacagcctgattacaatagcagtaaaatcccttccgctatggattccaactatcaacagtcctcagctggccaacctataaatgcaaagccatcccaaactgcaaatgctaagcccataccaagaactcctgatcatgaaatacaaggatcaaaagaagctttgattcaagatttggaaagaaagctgaaatgcaaggacacccttcttcataatggaaatcaacgtctaacatatgaagagaagatggctcgcagattgctaggaccacagaatgcagctgctgtgtttcaagctcaggatgacagtggtgcacaagactcgcagcaacacaactcagaacatgcgcgactgcaagttcctacatcacaagtaagaagtagatcaacctcaaggggagatgtgaatgatcaggatgcaatccaggagaaattttacccaccacgtttcattcaagtgccagagaacatgtcgattgatgaaggaagattctgcagaatggacttcaaagtgagtggactgccagctcctgatgtgtcatggtatctaaatggaagaacagttcaatcagatgatttgcacaaaatgatagtgtctgagaagggtcttcattcactcatctttgaagtagtcagagcttcagatgcaggggcttatgcatgtgttgccaagaatagagcaggagaagccaccttcactgtgcagctggatgtccttgcaaaagaacataaaagagcaccaatgtttatctacaaaccacagagcaaaaaagttttagagggagattcagtgaaactagaatgccagatctcggctatacctccaccaaagcttttctggaaaagaaataatgaaatggtacaattcaacactgaccgaataagcttatatcaagataacactggaagagttactttactgataaaagatgtaaacaagaaagatgctgggtggtatactgtgtcagcagttaatgaagctggagtgactacatgtaacacaagattagacgttacggcacgtccaaaccaaactcttccagctcctaagcagttacgggttcgaccaacattcagcaaatatttagcacttaatgggaaaggtttgaatgtaaaacaagcttttaacccagaaggagaatttcagcgtttggcagctcaatctggactctatgaaagtgaagaactttaataactttaccaacattggaaaacagccaactacaccattagtaatatatttgattacatttttttgaaattaatccatagctgtattaacagattatggttttaattaggtaatatagttaatatatatttataatattatttatcctttgactcttgcacattctatgtacccctccgatttgtgaagcctacaggaaatctgggtatatggatttgtaactgcagaagactatcttaaaatacaggattttaacatttaagtcatgcacatttaacaattacaggttataaattagtatcaactttttaaacacatctaatgcttgtaataacgtttactggtactgctttctaaatactgttttacccgttttctcttgtaggaatactaacatggtatagattatctgagtgttccacagttgtatgtcaaaagaaaataaaattcaaatatttaaaacggac

SEQ ID NO: 57019 - DNA, 4285 bp, Homo Sapiens
cgcgcttttctggaatctttcgcccccggaagggcagcggcgggcgcctgtgtggaaggtggggtggccagagacacccgagggacctgagctggatcgccatacctaccctgtggtcctcatcttcctggcctcatagctcctcctctccaagcatgtcttccccgttgcaaagagctgtgggagataccaagagggccttgtctgcatcttctagttcctctgccagtctaccctttgatgacagggactcaaaccatacctcagaggggaatggcgactctttgttagctgatgaagacactgactttgaagacagcttgaatcgcaatgtgaagaagagagcagcaaaacgaccaccgaaaacaacaccggtggcaaaacatccaaagaaagggtcccgagtggtacatcgtcatagccggaaacagtcagagccaccagccaatgatcttttcaatgctgtgaaagccgccaaaagtgacatgcagtctttggtagatgagtggctggatagctacaagcaagaccaggatgcaggatttctggagcttgttaactttttcatccaatcttgcggatgtaaaggcattgtgacccctgagatgttcaagaagatgtccaactcagagatcatccagcacctaacagagcagtttaatgaggactcgggggactaccctctcatagctccaggtccatcctggaagaagttccagggcagcttctgtgaatttgtgaggacattggtctgtcagtgccagtacagcctcctctatgatggcttccctatggacgacctcatctccctgctcactggcctctcagactcacaagtccgcgccttccgtcacactagcaccctggctgctatgaaactgatgacctccctggtaaaagttgccctccaactgagtgtgcaccaagataacaatcagcgtcagtatgaggctgaaagaaacaaggggccagggcagagggcacctgagcggctggagagcctgttggagaaacgcaaagagctccaagagcatcaagaggagattgaggggatgatgaatgccctcttcaggggtgtctttgttcatcggtacagggatgtccttcctgagatccgtgctatctgcattgaggaaattgggtgttggatgcaaagctacagcacgtctttcctcaccgacagctatttaaaatatattggttggactctgcatgataagcaccgagaagtccgcctgaagtgtgtgaaggccctgaaagggctgtacggtaaccgggacctgaccacacgcctggagctcttcaccagccgcttcaaggaccggatggtttccatggtcatggacagagagtatgatgtggcagtggaggctgtcagattactgatacttatccttaagaacatggaaggggtgctgacggacgcggattgtgagagcgtctacccagttgtgtatgcctctcatcgaggcctggcctctgccgcaggcgaatttctgtactggaaactcttctaccctgagtgcgagataagaatgatgggtggaagagagcaacgccagagcccaggcgcccagaggactttcttccagcttctgctgtccttctttgtggagagcgagctccatgaccacgctgcttacttagtagacagtctgtgggactgtgcaggggctcggctgaaggactgggagggtctgacaagcctgctgctggagaaggaccagaacctgggtgatgtgcaggagagcacactgatagaaatccttgtgtccagtgcccggcaagcttcagaggggcacccgcctgtgggccgggtcactgggaggaagggcttaacctctaaggagcgcaagacccaagccgatgacagggtgaagttgactgagcacctcatccccctgctgccccagctcctggccaagttctcagctgatgcagagaaggtcactcccctgctccagcttctcagctgctttgacctccacatctactgcactgggcgcttggagaagcacctggagctgttcctgcagcaactccaggaggtggtggtgaagcatgcagagccagcggtgcttgaggctggggcgcatgccctctacctgctctgtaatcccgaattcactttcttcagccgggcggactttgcccgcagccagctagtagatttgctgactgaccgcttccagcaggagcttgaagagctgttacagtcgtccttcctagatgaggatgaggtatataatctggcagccactctgaaacgcctctctgccttctacaacactcatgacctgactcgctgggagctctatgagccatgttgccaactcctgcagaaggctgtggacacaggagaggttcctcaccaggttatcctgccagccttgactcttgtctatttttccattctctggacactaacccacatttctaaatcagatgcttcccagaagcagctgtcgagtttgagggacagaatggtggccttctgtgaactctgccagagttgcctctcagatgtggatactgagatccaggagcaggcttttgtcttattaagtgatctacttctcatctttagccctcagatgattgttgggggccgtgatttccttaggccacttgtcttttttcctgaagctactctccagtctgagctagccagcttcctcatggaccacgtcttcatccagccgggagacctgggcagtggtgattcccaggaggatcatttacagatagagcggctacaccagcggcgccgcctcctagccgggttctgcaagctgttgctttatggggtgctggagatggatgcagcctcagatgttttcaaacactacaacaagttctacaatgactatggtgacattatcaaggaaacattaactagagcaaggcagattgaccgaagtcattgttcccgaatcctgctgctgagcctcaagcagctgtacacagaactgctgcaggagcatgggccccagggcctgaatgagcttcctgccttcatcgagatgagggacctggcccggaggtttgccttgagttttggaccccagcagctgcagaaccgtgacctcgtggtcatgctacacaaggaaggcatccagttctccttgtctgagcttcctccagctggctcctccaatcagcctccaaatctggcattcctggagctcctttcagagttttccccccgactcttccatcaggacaagcagcttttactgtcctatctagaaaagtgcctgcagcatgtctcccaggcacctggccatccctggggcccagtcaccacctactgccactccctcagccctgtggagaacacagcagagaccagccctcaggtcctccccagctccaagaggaggcgcgttgaagggcctgccaagcctaacagagaggacgtctcctcgtcccaggaagaaagtctgcagctgaacagcatcccgcccacgcccaccctcacctccacagctgtgaagagcaggcagcccctgtgggggttgaaagagatggaggaagaagatggctcagagttggattttgcccagggtcagcccgtcgcaggcaccgagaggtcaaggttcttgggtccacaatatttccagactccacacaacccttcaggtcctggcctgggcaaccagctgatgcgactcagccttatggaagaggacgaggaagaagagttagaaatccaggatgagtcaaatgaagaacggcaggatacagacatgcaagcaagtagctactcttccaccagtgagcgcgggctggacctcttagattctacagagctggatattgaggatttctgacaggactctgggcccctccccagctccactccctacctcaagaatgtgaccatttggaaaaggcaaagagaaaaggagcaaaatgaagcattcccccaggcttcagccctgggctctgaggggaaagagttgggcattgtttttctaacctaacctttccctctggggtagagaagccgagagaccctgtcctccctaatgcactgtggcccagtccccttgcctttttcctgttctgtttggagtggagaagggcagcacctctgtgtttaatggaaatagcccatagtctcctggatttttggaacatctttctcagcctattttgtgtcctaatgattcgctcaataaacatgtttgaatccacacgttaaaaaaaaaaaaaaaaaaaaaaaaaaaaaaaaaaaaaaaaaaaaaaaaaaaaaaaaaaaaaaaaaaaaaaaaaaaaaaaa

SEQ ID NO: 57020 - DNA, 3260 bp, Homo Sapiens
tcgaaacagctgccggctggtcccggccgaggccggcgcagggagggaggagccgcccgggctgtgggggcgccgcgagctgggccggcctcggtgtgcccgcgccgccagcccgctccagacgcgccacctgggcgctccaagaagaggccgaagtttgccgcggccgtgagttggagctcgcgccgggccgctgcgccgggagctccgggggcttccctcgcttcccggtattgtttgcaaactttgctgctctccgccgcggcccccaactcggcggacgccgggcgcggagagccgagccgggggcgctgtgcgcagcgctcgggccaggccgggcgggcatgggcgggggcccgagcaggggtggagagccggggccagcagcagcccgtgcccgggagcggcggcgctgaggggcgcggagctccccgcgaggacacgtccaacgccagcatgcagcgcccgggcccccgcctgtggctggtcctgcaggtgatgggctcgtgcgccgccatcagctccatggacatggagcgcccgggcgacggcaaatgccagcccatcgagatcccgatgtgcaaggacatcggctacaacatgactcgtatgcccaacctgatgggccacgagaaccagcgcgaggcagccatccagttgcacgagttcgcgccgctggtggagtacggctgccacggccacctccgcttcttcctgtgctcgctgtacgcgccgatgtgcaccgagcaggtctctacccccatccccgcctgccgggtcatgtgcgagcaggcccggctcaagtgctccccgattatggagcagttcaacttcaagtggcccgactccctggactgccggaaactccccaacaagaacgaccccaactacctgtgcatggaggcgcccaacaacggctcggacgagcccacccggggctcgggcctgttcccgccgctgttccggccgcagcggccccacagcgcgcaggagcacccgctgaaggacgggggccccgggcgcggcggctgcgacaacccgggcaagttccaccacgtggagaagagcgcgtcgtgcgcgccgctctgcacgcccggcgtggacgtgtactggagccgcgaggacaagcgcttcgcagtggtctggctggccatctgggcggtgctgtgcttcttctccagcgccttcaccgtgctcaccttcctcatcgacccggcccgcttccgctaccccgagcgccccatcatcttcctctccatgtgctactgcgtctactccgtgggctacctcatccgcctcttcgccggcgccgagagcatcgcctgcgaccgggacagcggccagctctatgtcatccaggagggactggagagcaccggctgcacgctggtcttcctggtcctctactacttcggcatggccagctcgctgtggtgggtggtcctcacgctcacctggttcctggccgccggcaagaagtggggccacgaggccatcgaagccaacagcagctacttccacctggcagcctgggccatcccggcggtgaagaccatcctgatcctggtcatgcgcagggtggcgggggacgagctcaccggggtctgctacgtgggcagcatggacgtcaacgcgctcaccggcttcgtgctcattcccctggcctgctacctggtcatcggcacgtccttcatcctctcgggcttcgtggccctgttccacatccggagggtgatgaagacgggcggcgagaacacggacaagctggagaagctcatggtgcgtatcgggctcttctctgtgctgtacaccgtgccggccacctgtgtgatcgcctgctacttttacgaacgcctcaacatggattactggaagatcctggcggcgcagcacaagtgcaaaatgaacaaccagactaaaacgctggactgcctgatggccgcctccatccccgccgtggagatcttcatggtgaagatctttatgctgctggtggtggggatcaccagcgggatgtggatttggacctccaagactctgcagtcctggcagcaggtgtgcagccgtaggttaaagaagaagagccggagaaaaccggccagcgtgatcaccagcggtgggatttacaaaaaagcccagcatccccagaaaactcaccacgggaaatatgagatccctgcccagtcgcccacctgcgtgtgaacagggctggagggaagggcacaggggcgcccggagctaagatgtggtgcttttcttggttgtgtttttctttcttcttcttctttttttttttttataaaagcaaaagagaaatacataaaaaagtgtttaccctgaaattcaggatgctgtgatacactgaaaggaaaaatgtacttaaagggttttgttttgttttggttttccagcgaagggaagctcctccagtgaagtagcctcttgtgtaactaatttgtggtaaagtagttgattcagccctcagaagaaaacttttgtttagagccctccctaaatatacatctgtgtatttgagttggctttgctacccatttacaaataagaggacagataactgctttgcaaattcaagagcctcccctgggttaacaaatgagccatccccagggcccacccccaggaaggccacagtgctgggcggcatccctgcagaggaaagacaggacccggggcccgcctcacaccccagtggatttggagttgcttaaaatagactccggccttcaccaatagtctctctgcaagacagaaacctccatcaaacctcacatttgtgaactcaaacgatgtgcaatacatttttttctctttccttgaaaataaaaagagaaacaagtattttgctatatataaagacaacaaaagaaatctcctaacaaaagaactaagaggcccagccctcagaaacccttcagtgctacattttgtggctttttaatggaaaccaagccaatgttatagacgtttggactgatttgtggaaaggaggggggaagagggagaaggatcattcaaaagttacccaaagggcttattgactctttctattgttaaacaaatgatttccacaaacagatcaggaagcactaggttggcagagacactttgtctagtgtattctcttcacagtgccaggaaagagtggtttctgcgtgtgtatatttgtaatatatgatatttttcatgctccactattttattaaaaataaaatatgttctttagtttgctgctaaaaaaa

SEQ ID NO: 57021 - DNA, 3198 bp, Homo Sapiens
ctctttcaagggcaggtctccagcccagctctctgaaaacattttgctgaaaatataagcaaacatcggccttgtcctccttgtgttcatacactgtggaagcttttctctgcctcctccgtgagagtgcgtggccgggagaccagaaacgtggtcctttctcttgcctgtgagctggtgcagagatggaggaagaagaatatgaacaaattccccaggagaatcccccagaagagctgtcccaggatcctgtgctggagctgtcaggaggtctcgccagaggtggcagacgctatctgccaagccatcgtcttatccgccccagggccccacgccgtgctcctggtgacacaactgggccggttcacggatgaggatcagcaggtggtcaggcgcctgcaggaggtctttggagtgggggttctgggtcacaccatcctggtgttcacccggaaggaagacctggctggcggctccctggaagactatgtgcgagagaccaacaaccaggcccttgcctggctggatgtgacccttgcacggcgccattgcggcttcaacaacagggcacagggggaggagcaggaggcccaactgcgagagctcatggagaaagttgaagccattatgtgggaaaacgaaggagattattacagcaacaaggcttaccaatatacccagcaaaactttcggctgaaagaactacaggaaaggcaagtaagccagggccaaggctctgaggacgtgcctggtgaggagtcttggctggaaggactgtcccagatccagaaggaatctgaggaagcccacagatgcctgctggggaaggctgacctttgagcctgtgctggacttgagccaaggacaccatcagcctttgcacccccctgtgtccagccctctgtttctctttccatcccatggagtgcttcccagtctccaggtcatgacgtctggtgtaggaagaggggcatggggcttgaggacagggtccagcatgcccagatcacattccagttccttcattccttcttccagaacatctgggtcctccctcctctgtgccccaacagcacgctgtcttcctattggaccttctatctcattggcattgcctttcatgagttacttgtctatactctgatagaaccaaagtttcttgagggcaggcctgtatcttttacttctgtgtaacttccacagcttttgactgcattggagtcatgcagtcacgtttggtgcggcaactccatgcaagctgttgaccagatgacttctcatctctccccacaccatgatggtttaaggtgcctgttgtgtctggtggctggaacatggcagtggtgctgagacatggggagggttggagactgggtggggagggttggagactgggctgggaggagagcaagcaggaacagggatggaggcaggaggagcagcccttttattcactcttgagctgtaacaaacaagccccgttggaacttcctagtgggaatgatgggagaagtttggggcagggtatccaagaagtcagactgtggtcaagtaggtggtcccttgccctggctacagaacatggaagcccctagggatgcaagtggacttgggcagaggaggtcacaccaccccaccaaggtagacttagattagagatgacttgcatctgttacttcccctttttccatgggtttcatggcccctcatgatatttgccttctgctcctagaaggcacagactactttcaacctgcctcgcccttcactgccacccctcccttctcccttgataatgggagcatgtggatggggtgtctgcgtgtgcaaacgggttccctagcaaagtatttgtgggggtccaatgcaaggaggcagggaagaaagggggcctgcaaaggaagcagtagagtgacttaaacatcttgcgaggcagcctgcctggtttatgggagaactctgaagcccatgatgttttcctggaaggctgttcctacagacggggtttataagtactgatactggacaggatgagaagggagtaggatgtcatcctgtctcaggcctcggataggaagctgcctgccagcaagaggagactgatgtgccccgggtgcaccccacctcctttgaggtccaagatgctcctggggagttgaccgacatttgggaagataataggaggcattggggaaactgctccccaatatattcctcttttcctttcttcaagctgcgtagcagggggcctttagctagtttctcccgagaggggcgggaagtacagctggtggagacagtgctgggagatgatcagaaatctcagggcacagcctcaggtctacctggacactcatccactgttggagatgctcaacagctagacacagatgctcacagccgacctgtggcctcttgctctgaagccatcccccatcttccctagacacagcagacatctgagaaagcttcagcatttctcttgctaacagattcagaaaagtgtctcaaagcagagcacagagttatttggtgtttgctgaagacagcctttgtgccacaatcacttattaaataagcgatcaatttcccattgaactgaacatgcaacatttatcatacattcagttctcattcacactccttaagatttggtcagaatttttatttctgttcatgtcttctacttttctactcctgtatgaataaaatattgatttgattacagtggctttgactataatgtgggagccaatttttgcctcagtcttcatttttatatttaccttgttattctcaggcatttttttcttctatgtgagagttaaaatcattctgtaatttccccccaaaatcatattggtattctagttggcaatgtcttacatttatgttaagtttgagggaattggtagttcaagtataagttaattaaggccattttatttctaagtgaacagacttgaaactccagagctactgaagtaaaagttagaatcatttgcattttcattcagataggagataattttgtaaattttgatgctattattttaactctattagcttaagtaatgtcataatagaaaacacaagcatttgaccaaatgagatccattcagcgactaactggcaaggcactcaaaacatgtcattcattaaatgttgtttttatttacctcaaaaaaaaaaaaaaaa

SEQ ID NO: 57022 - DNA, 2651 bp, Homo Sapiens
tctttttcttttttttttaagaaaaactagtgacattgcagagaaggacgcttcctctctatcttttggcgcattagtgaagggggtattctattttgttaaagcgcccaagggggcgcagggaccttggagagaagagtggggaggaaagaggaagggtgggtggggggcagagggcgagtcggcggcggcgagggcaagctctttcttgcggcacgatgccgtctctgctggtgctcactttctccccgtgcgtactactcggctgggcgttgctggccggcggcaccggtggcggtggcgttggcggcggcggcggtggcgcgggcataggcggcggacgccaggagagagaggcgctgccgccacagaagatcgaggtgctggtgttactgccccaggatgactcgtacttgttttcactcacccgggtgcggccggccatcgagtatgctctgcgcagcgtggagggcaacgggactgggaggcggcttctgccgccgggcactcgcttccaggtggcttacgaggattcagactgtgggaaccgtgcgctcttcagcttggtggaccgcgtggcggcggcgcggggcgccaagccagaccttatcctggggccagtgtgcgagtatgcagcagcgccagtggcccggcttgcatcgcactgggacctgcccatgctgtcggctggggcgctggccgctggcttccagcacaaggactctgagtactcgcacctcacgcgcgtggcgcccgcctacgccaagatgggcgagatgatgctcgccctgttccgccaccaccactggagccgcgctgcactggtctacagcgacgacaagctggagcggaactgctacttcaccctcgagggggtccacgaggtcttccaggaggagggtttgcacacgtccatctacagtttcgacgagaccaaagacttggatctggaagacatcgtgcgcaatatccaggccagtgagagagtggtgatcatgtgtgcgagcagtgacaccatccggagcatcatgctggtggcgcacaggcatggcatgaccagtggagactacgccttcttcaacattgagctcttcaacagctcttcctatggagatggctcatggaagagaggagacaaacacgactttgaagctaagcaagcatactcgtccctccagacagtcactctactgaggacagtgaaacctgagtttgagaagttttccatggaggtgaaaagttcagttgagaaacaagggctcaatatggaggattacgttaacatgtttgttgaaggattccacgatgccatcctcctctacgtcttggctctacatgaagtactcagagctggttacagcaaaaaggatggagggaaaattatacagcagacttggaacagaacatttgaaggtatcgccgggcaggtgtccatagatgccaacggagaccgatatggggatttctctgtgattgccatgactgatgtggaggcgggcacccaggaggttattggtgattattttggaaaagaaggtcgttttgaaatgcggccgaatgtcaaatatccttggggccctttaaaactgagaatagatgaaaaccgaattgtagagcatacaaacagctctccctgcaaatcatgtggcctagaagaatcggcagtgacaggaattgtcgtgggggctttactaggagctggcttgctaatggccttctactttttcaggaagaaatacagaataaccattgagaggcgaacccagcaagaagaaagtaaccttggaaaacatcgggaattacgggaagattccatcagatcccatttttcagtagcttaaaggaagccccccactttttttttttctgcctgagattctttaaggagatagacgggttgaaagacatcaatgaaacagaaggggcgttcttgaagaattcataattttaagcagttagtaatttcattttaaaatttctgtagaagctcaggaattatgattaatcaccatctgcctccaggcctttcatctcatgacaaacaaatataataatgatatcgtgtcactctgttaaatgttcatactgtttcaagcccatatgattagatttatgtttttaaaatctgttgtctccatatcttgatggcttttgggagcatttcacacaaggatataaaatgcggttttcttaaatgaaatgttttgtagctagaataaaatcatttttacaagtacagcattcttggaaagaatttaacacccaaaaaggggaaaatgtaatgaaaaatctcaaggttggaaatacagccttactctctctagagctggaggacaggtttgtggttgaggacttctctgtccgatgtctacattcaggttctgacttcatatcttgaaaaaggatttcctccctgtctttttcagtgtctcataaacgctactctggattgttgtaaatattagtgagatgggaggatttacagaagaaaagcaagtcaaaaatatttcctttttgatgtaaaaaaaaaaagccctatttcgcactaacattttattttacaagtattttaatcttatattttggtattagaaaaatttgtctattttttcattttgaagattaaatgttgcttacattttaaaaaaaaa

SEQ ID NO: 57023 - DNA, 2837 bp, Homo Sapiens
agaccctcctgccaggtgacagccgccaagatggggtcttgggccctgctgtggcctcccctgctgttcaccgggctgctcgtccgacccccggggaccatggcccaggcccagtactgctctgtgaacaaggacatctttgaagtagaggagaacacaaatgtcaccgagccgctggtggacatccacgtcccggagggccaggaggtgaccctcggagccttgtccaccccctttgcatttcggatccagggaaaccagctgtttctcaacgtgactcctgattacgagaaggctgggccatttcgggatgaagctgcctgggcccacaccctcagcactgaccactgatgatggggaccctgggccagcgcctgcccacttggcctcagtctccccacctgtggggcaggacggtgactgcagacctgtctacatccacaggagaagtcactgcttgaggctcagctgctgtgtcagagcggaggcacattggtgacccagctaagggtgttcgtgtcagtgctggacgtcaatgacaatgcccccgaattcccctttaagaccaaggagataagggtggaggaggacacgaaagtgaactccaccgtcatccccgagacgcaactgcaggctgaggaccgcgacaaggacgacattctgttctacaccctccaggaaatgacagcaggtgccagtgactacttctccctggtgagtgtaaaccgtcccgccctgaggctggaccggcccctggacttctacgagcggccgaacatgaccttctggctgctggtgcgggacactccgggggagaatgtggaacccagccacactgccaccgccacactagtgctgaacgtggtgcccgccgacctgcggcccccgtggttcctgccctgcaccttctcagatggctacgtctgcattcaagctcagtaccacggggctgtccccacggggcacatactgccatctcccctcgtcctgcgtcccggacccatctacgctgaggacggagaccgcggcatcaaccagcccatcatctacagcatctttaggggaaacgtgaatggtacattcatcatccacccagactcgggcaacctcaccgtggccaggagtgtccccagccccatgaccttccttctgctggtgaagggccaacaggccgaccttgcccgctactcagtgacccaggtcaccgtggaggctgtggctgcggccgggagcccgccccgcttcccccagagcctgtatcgtggcaccgtggcgcgtggcgctggagcgggcgttgtggtcaaggatgcagctgccccttctcagcctctgaggatccaggctcaggacccggagttctcggacctcaactcggccatcacatatcgaattaccaaccactcacacttccggatggagggagaggttgtgctgaccaccaccacactggcacaggcgggagccttctacgcagaggttgaggcccacaacacggtgacctctggcaccgcaaccacagtcattgagatacaagtttccgaacaggagcccccctccacagatgtccccccatccccagaggctggaggaacaactgggccctggaccagcaccacttccgaggtccccagaccccctgagccctcccagggaccctccacgaccagctctgggggaggcacaggccctcatccaccctctggcacaactctgaggccaccaacctcgtccacacccggggggtccccgggtgcagaaaacagcacctcccaccaaccagccactcccggtggggacacagcacagaccccaaagccaggaacctctcagccgatgccccccggtgtgggaaccagcacctcccaccaaccagccacacccagtgggggcacagtacagaccccagagccaggaacctctcagccgatgccccccagtatgggaaccagcacctcccaccaaccagccacacccggtgggggcacagcacagaccccagaggcaggaacctctcagccgatgccccccggtatgggaaccagcacctcccaccaaccaaccacacccggtgggggcacagcacagaccccagagccaggaacctctcagccgatgcccctcagcaagagcaccccatcttcaggtggcggcccctcggaggacaagcgcttctcggtggtggatatggcggccctgggcggggtgctgggtgcgctgctgctgctggctctccttggcctcgccgtccttgtccacaagcactatggcccccggctcaagtgctgctctggcaaagctccggagccccagccccaaggctttgacaaccaggcgttcctccctgaccacaaggccaactgggcgcccgtccccagccccacgcacgaccccaagcccgcggaggcaccgatgcccgcagagcccgcaccccccggccctgcctccccaggcggtgcccctgagccccccgcagcggcccgagctggcggaagccccacggcggtgaggtccatcctgaccaaggagcggcggccagagggcgggtacaaggctgtctggtttggcgaggacatcgggacggaggcagacgtggtcgttctcaacgcgcccaccctggacgtggatggcgccagtgactccggcagcggcgatgagggcgagggcgcggggaggggtgggggtccctacgatgcgcccggtggtgatgactcctacatctaagtggcccctccaccctctcccccagccgcacgggcactggaggtctcgctcccccagcctccgacccgaggcagaataaagcaaggctcccgaaaaaaaaaaaaaaaaaaaaaaaa

SEQ ID NO: 57024 - DNA, 1993 bp, Homo Sapiens
aggaagaaaatataaagtacacttttaaaacatgaagtcttcatagcagcttatagtcgttcagagaaacatgttccactgagaatgacttgagagagaggattacatcattatgccagaaggaagaagccactgtgcatgctctatcaccagcctcaccctcctggtcagccttacaagagtgacactggatatactccagaagttggacccaccacagcctgcacactggacttcttggcttttatgagctattcaagagatatttagtcatcacgttgtgtcacaatgggagtgactcacagagcaaggagagaacctgaggattcctcacacatgtagtactcagagctctacggaaacccaggcacctcgacctcaagaggatcagcctggccagggtggcacaactcttccttccccgtgcacagcaggaaagctgccatcagctgagcaagtccaccaacagtttctgtgtcccacttcatctttaataaggacaccatcttcttgtattatacaagaaaggagtgtacctatcacacacagggggaaaaatgctcttttgggtgctaggcctcctaatcctctgtggttttctgtggactcgtaaaggaaaactaaagattgaagacatcactgataagtacatttttatcactggatgtgactcgggctttggaaacttggcagccagaacttttgataaaaagggatttcatgtaatcgctgcctgtctgactgaatcaggatcaacagctttaaaggcagaaacctcagagagacttcgtactgtgcttctggatgtgaccgacccagagaatgtcaagaggactgcccagtgggtgaagaaccaagttggggagaaaggtctctggggtctgatcaataatgctggtgttcccggcgtgctggctcccactgactggctgacactagaggactacagagaacctattgaagtgaacctgtttggactcatcagtgtgacactaaatatgcttcctttggtcaagaaagctcaagggagagttattaatgtctccagtgttggaggtcgccttgcaatcgttggagggggctatactccatccaaatatgcagtggaaggtttcaatgacagcttaagacgggacatgaaagcttttggtgtgcacgtctcatgcattgaaccaggattgttcaaaacaaacttggcagatccagtaaaggtaattgaaaaaaaactcgccatttgggagcagctgtctccagacatcaaacaacaatatggagaaggttacattgaaaaaagtctagacaaactgaaaggcaataaatcctatgtgaacatggacctctctccggtggtagagtgcatggaccacgctctaacaagtctcttccctaagactcattatgccgctggaaaagatgccaaaattttctggatacctctgtctcacatgccagcagctttgcaagactttttattgttgaaacagaaagcagagctggctaatcccaaggcagtgtgactcagctaaccacaaatgtctcctccaggctatgaaattggccgatttcaagaacacatctccttttcaaccccattccttatctgctccaacctggactcatttagatcgtgcttatttggattgcaaaagggagtcccaccatcgctggtggtatcccagggtccctgctcaagttttctttgaaaaggagggctggaatggtacatcacataggcaagtcctgccctgtatttaggctttgcctgcttggtgtgatgtaagggaaattgaaagacttgcccattcaaaatgatctttaccgtggcctgccccatgcttatggtccccagcatttacagtaacttgtgaatgttaagtatcatctcttatctaaatattaaaagataagtcaaacattaaaaaaaaaaaaaaaaaaaaaaaaaaaaaaaaaaaaaaaaaaaaaaaaaaaaaaaaaaaaaaaaaaaaaaaaaaaa

SEQ ID NO: 57025 - DNA, 953 bp, Homo Sapiens
agcggcgcaagcggcggcggccactgccacgtattcccggcagtggtggcgggggcggcggcggcgcccgcgggcaggaataactcaagtcacctgtactggaaatcagtttgctgaaattaatcaacgattcttgaagttgaagaaaaggaggttccagccttggcaagaggagtgtggcccttcctggaatccctctggacacaccctcctagcatcctctaggaaagatgcggcagctcaaagggaagcccaagaaggagacctccaaggacaagaaggagcggaagcaagccatgcaggaggcccggcagcagatcactacagtggtgctgcccacgctggccgtggtcgtgctcttgatcgtggtgtttgtgtacgtggccacgcgccccaccatcaccgagtgagccccgcagccggctgcggaccccatcggcagggagaggaaggcgcgggagggggacgcaaacaaaaaaatggctttcatattcagagatgttcatgttgctgagctgtaagcaggagcaccctgtcttctctggtctttgacttgattaaagtatctccgctttcttgggagggaataggggatgttttatcagtgaatgtgccatacaccttatggtccacttcatgtgcctttcagacttcaaagcgcgcgcgcatgtgtgtgtgtgtgtgtgtgtgtgtgtgtgtgtgtgtgtgcttctttttctctcctaaaaatcgataagtagctccacctgaagagggatggaacctctgggtcaggaaacagctggaatccacactcacctcattcccattgtttggatcatgcttctttccaacacgtgttcacaatctccaaagggactgtatttcttctctgtgcttaatgtgatttgaaatatgttgaatcaaagtgaaatatttattttttgaataaaggagataatagccttaaaaaa

SEQ ID NO: 57026 - DNA, 3033 bp, Homo Sapiens; identical to SEQ ID NO: 30429

SEQ ID NO: 57027 - DNA, 1235 bp, Homo Sapiens
ctttcagtaatcattcaaccaacgcttccatgtctctactctgtcgtaacaaaggctgtgggcagcactttgaccctaataccaaccttcctgattcctgttgccatcaccctggggtcccaatcttccatgatgcacttaagggttggtcctgctgccgaaagcgaactgtagatttctctgagttcttaaacatcaagggctgtactatgggaccacactgtgctgagaagcttcctgaggcccctcaacctgaaggccctgctacaagcagttcacttcaggagcaaaaacctctgaatgtgattccaaagtcagcagagaccttgcgccgggagaggcccaagtcagagttgcctctgaagctgctgccgctaaatatatcccaagccctggaaatggcattggaacagaaggaattagaccaggaacctggggcaggacttgacagtctgatccggactggttccagctgccagaacccaggatgtgatgctgtttaccaaggccctgagagtgatgctactccatgtacctaccacccaggagcaccccgattccatgaggggatgaagtcttggagctgttgtggcatccagaccctggattttggggcatttttggcacaaccagggtgcagagtcggtagacatgactgggggaagcagctcccagcatcttgccgccatgattggcaccagacagattccttagtagtggtgactgtatatggccagattccacttcctgcgtttaactgggtgaaggccagtcaaactgagcttcatgtccacattgtctttgatggtaaccgtgtgttccaagcacagatgaagctctggggggtcataaacgtggagcagagctctgtcttcttgatgccatctcgggttgaaatctccctggtcaaggctgacccaggatcctgggcccagctggagcaccctgatgcactagctaagaaggctagggcaggggttgtgttagagatggatgaggaagaatctgacgattcagatgatgatctgagctggacagaggaggaggaagaggaggaagcaatgggggaatagtgacaccagacagttgatgtctagataggacctcaatgattcccttagaatcttagataccaggatattgttggccatgtggcatcattgagcagcaggaggctgaaggaggggagaacaaaattgtccaaaccatgctgtttttttcccttaaataaatct

SEQ ID NO: 57028 - DNA, 2501 bp, Homo Sapiens; identical to SEQ ID NO: 30449

SEQ ID NO: 57029 - DNA, 823 bp, Homo Sapiens
atggcaggccctgcagggagccagagtctgggtcccctgtgcttccacagcagcccccaagccctctacacggtcctcttaatagtgctggtcatgatgagcttggtgtttggtaagtggctccaagggttcagaagggtctcctggcctggatggagaaacccacagacaccaagtgtctgggtacacctgtccaggatgctcaggtaagtttgttcctgtcaattgggaaccccctcaaccacttccattccccaaatacctgcgctgctaccgatgcctcttggagaccaaggagttagggtgccttctgggatctgacatctgcctcaccccagctggcagcagctgcatcactctccacaaaaagaacagcagcggttctgacgtcatggtgagtgactgccgaagtaaggagcagatgagtgattgttcaaatacccgaacttctccggtgtctggcttctggatattctctcaatactgcttcctggatttctgcaatgaccctcaaaacagagggctctatactccttagtgtgactgcagcaaactttggtgtaaaattccaccagtttccagccaccttcctgacttctatctgggcttggccaggacttctagtccctcataccagccctccttgcctccctccagccactggaccccagccttggctcttcctcttggttgacgcccttcagcacacttactgctactctgtacccccagccctactgcccaccaggtttcctctcttgtcccctagtccctggatgtttctcccaaataaatttgtgtgtaaactgttaaaaaaaaaaaa

SEQ ID NO: 57030 - DNA, 3381 bp, Homo Sapiens; identical to SEQ ID NO: 23548

SEQ ID NO: 57031 - DNA, 3659 bp, Homo Sapiens
cgggagcccgcggcgagcgtagcgcaagtccgctccctaggcatcgctgcgctggcagcgattcgctgtctcttgtgagtcaggggacaacgcttcggggcaactgtgagtgcgcgtgtgggggacctcgattctcttcagatctcgaggattcggtccggggacgtctcctgatcccctactaaagcgcctgctaactttgaaaaggagcactgtgtcctgcaaagtttgacacataaaggataggaaaagagaggagagaaaagcaactgagttgaaggagaaggagctgatgcgggcctcctgatcaattaagaggagagttaaaccgccgagatcccggcgggaccaaggaggtgcggggcaagaaggaacggaagcggtgcgatccacagggctgggttttcttgcaccttgggtcacgcctccttggcgagaaagcgcctcgcatttgattgcttccagttattgcagaacttcctgtcctggtggagaagcgggtctcgcttgggttccgctaatttctgtcctgaggcgtgagactgagttcatagggtcctgggtccccgaaccaggaagggttgagggaacacaatctgcaagcccccgcgacccaagtgaggggccccgtgttggggtcctccctccctttgcattcccacccctccgggctttgcgtcttcctggggaccccctcgccgggagatggccgcgttgatgcggagcaaggattcgtcctgctgcctgctcctactggccgcggtgctgatggtggagagctcacagatcggcagttcgcgggccaaactcaactccatcaagtcctctctgggcggggagacgcctggtcaggccgccaatcgatctgcgggcatgtaccaaggactggcattcggcggcagtaagaagggcaaaaacctggggcaggcctacccttgtagcagtgataaggagtgtgaagttgggaggtattgccacagtccccaccaaggatcatcggcctgcatggtgtgtcggagaaaaaagaagcgctgccaccgagatggcatgtgctgccccagtacccgctgcaataatggcatctgtatcccagttactgaaagcatcttaacccctcacatcccggctctggatggtactcggcacagagatcgaaaccacggtcattactcaaaccatgacttgggatggcagaatctaggaagaccacacactaagatgtcacatataaaagggcatgaaggagacccctgcctacgatcatcagactgcattgaagggttttgctgtgctcgtcatttctggaccaaaatctgcaaaccagtgctccatcagggggaagtctgtaccaaacaacgcaagaagggttctcatgggctggaaattttccagcgttgcgactgtgcgaagggcctgtcttgcaaagtatggaaagatgccacctactcctccaaagccagactccatgtgtgtcagaaaatttgatcaccattgaggaacatcatcaattgcagactgtgaagttgtgtatttaatgcattatagcatggtggaaaataaggttcagatgcagaagaatggctaaaataagaaacgtgataagaatatagatgatcacaaaaagggagaaagaaaacatgaactgaatagattagaatgggtgacaaatgcagtgcagccagtgtttccattatgcaacttgtctatgtaaataatgtacacatttgtggaaaatgctattattaagagaacaagcacacagtggaaattactgatgagtagcatgtgactttccaagagtttaggttgtgctggaggagaggtttccttcagattgctgattgcttatacaaataacctacatgccagatttctattcaacgttagagtttaacaaaatactcctagaataacttgttatacaataggttctaaaaataaaattgctaaacaagaaatgaaaacatggagcattgttaatttacaacagaaaattaccttttgatttgtaacactacttctgctgttcaatcaagagtcttggtagataagaaaaaaatcagtcaatatttccaaataattgcaaaataatggccagttgtttaggaaggcctttaggaagacaaataaataacaaacaaacagccacaaatacttttttttcaaaattttagttttacctgtaattaataagaactgatacaagacaaaaacagttccttcagattctacggaatgacagtatatctctctttatcctatgtgattcctgctctgaatgcattatattttccaaactatacccataaattgtgactagtaaaatacttacacagagcagaattttcacagatggcaaaaaaatttaaagatgtccaatatatgtgggaaaagagctaacagagagatcattatttcttaaagattggccataacctgtattttgatagaattagattggtaaatacatgtattcatacatactctgtggtaatagagacttgagctggatctgtactgcactggagtaagcaagaaaattgggaaaactttttcgtttgttcaggttttggcaacacatagatcatatgtctgaggcacaagttggctgttcatctttgaaaccaggggatgcacagtctaaatgaatatctgcatgggatttgctatcataatatttactatgcagatgaattcagtgtgaggtcctgtgtccgtactatcctcaaattatttattttatagtgctgagatcctcaaataatctcaatttcaggaggtttcacaaaatggactcctgaagtagacagagtagtgaggtttcattgccctctataagcttctgactagccaatggcatcatccaattttcttcccaaacctctgcagcatctgctttattgccaaagggctagtttcggttttctgcagccattgcggttaaaaaatataagtaggataacttgtaaaacctgcatattgctaatctatagacaccacagtttctaaattctttgaaaccactttactactttttttaaacttaactcagttctaaatactttgtctggagcacaaaacaataaaaggttatcttatagtcgtgactttaaacttttgtagaccacaattcactttttagttttcttttacttaaatcccatctgcagtctcaaatttaagttctcccagtagagattgagtttgagcctgtatatctattaaaaatttcaacttcccacatatatttactaagatgattaagacttacattttctgcacaggtctgcaaaaacaaaaattataaactagtccatccaagaaccaaagtttgtataaacaggttgctataagcttggtgaaatgaaaatggaacatttcaatcaaacatttcctatataacaattattatatttacaatttggtttctgcaatatttttcttatgtccacccttttaaaaattattatttgaagtaatttatttacaggaaatgttaatgagatgtattttcttatagagatatttcttacagaaagctttgtagcagaatatatttgcagctattgactttgtaatttaggaaaaatgtataataagataaaatctattaaatttttctcctctaaaaactgaaaaaaaaaaaaaaaaaaaaaaaa

SEQ ID NO: 57032 - DNA, 2974 bp, Homo Sapiens; identical to SEQ ID NO: 25062

SEQ ID NO: 57033 - DNA, 1851 bp, Homo Sapiens; identical to SEQ ID NO: 30755

SEQ ID NO: 57034 - DNA, 2838 bp, Homo Sapiens
gggtgggcgggcggctgctccggtccaggggtggaggtcggggccctgacccgacgcagccaggcggaagcgcggctgccattggaggctgcttttacctgcgcggggcccggggcgcaaagtccgaggcgccggggggaggaggcggcggacggcagcgcaggtgggcccgcgctctcggccctgcaagatgcccctgaagctgcgggggaagaagaaggccaagtccaaggagaccgccgggctggtggagggcgagccgacgggcgcgggcggcgggagcctctcagcgtcccgggctcccgcacgcaggctggtcttccacgcgcagctggcgcacggtagtgccacgggccgagtggagggcttctccagcatccaggagctctacgcccagatcgcgggcgcgtttgaaatctcgccgtcggagatcttatattgcactttaaacacacctaaaattgacatggaaagactcttaggaggacaactaggactagaagatttcatatttgcccatgtgaaaggaatcgaaaaagaagtgaatgtgtataaatctgaggattcacttggtctcaccattacagataatggtgttggctatgcttttataaagagaattaaagatggtggtgttattgactcagttaaaacaatctgtgttggggatcatattgaatccataaatggagaaaatattgttgggtggcgtcactatgatgttgctaagaagttaaaggaattaaaaaaggaggaactctttactatgaagttaatagaacctaagaaggcatttgaaatagagctgaggtcaaaggctggaaagtcatcaggagaaaaaattggttgtggaagggcaacacttcgcctgagatcaaaaggtcctgccaccgtggaagaaatgccttctgaaaccaaagcaaaggcaattgaaaagattgatgatgttcttgagttgtacatgggaattcgagatattgatttagccaccacaatgtttgaagctggaaaggacaaagtaaatccagatgaatttgctgtggcacttgacgaaactcttggagactttgcgttcccagacgaatttgtctttgatgtttggggagtcattggtgatgccaaacgaagaggattatgatgtgtacactccatctctgaagaaacaacccatcgttcttttttttctcttttttaaaaagtcctataagatctgtttttggacacctttactaactctggtttaatttcatgtgtatggaatatattctttgaaatataattttggtaattttgatttctgggcactttttaacattgctgatgtagtatgcttaagagaaatgacctaaataaggatcaattgtaatattcattcaaaaggtttttaaaagtaagttttaaggagtatttctcgacagatgattttcttctccattaatacccatgctttgtttttcacatataaatagatgatttcaatagctttgtagttttttttcaaaatcttaatgtaaactaggattggagtatgatttacctcatagtatcttcactgtgttatcctagtttgaacaggatatgttcaggaaatgaaaggtgaattatgccccttattggtctagaagcattggtttttttttgatcctctgagtaagggaaggaagattcctgtggcatgttgatttctatggccaactttctctctttgtaaaacaaagattgattgattttcttgtatgcttctttatacatgctcttaaaacttgtggttgaaatctgtgctgtgtgtgtgtgtctctgcatgtgtaaaagaagggtaaaaaagagatgggtagggtagaactacttgcatttgatttttttttcagtccttaaaacattatttctttttttcactcatagccacttttatgttaccttttataagcactccagggaagattttatatttttttgtagagtttttggaaagatatttactcaaaataactatgctttagaactttttttttttttttttttttggttaaacagcagcactttttagttccctaaactttagaagaaatgctatcagaaatagatttccttccagtggaaagaaaggaggaagggagaattgagaaaatatattagtctattattttagagttctaatacactctaaattatagagaaaattgagagtaaatgactgtcttatcactcttatttgacatttcgtaggtgtaagagaaatggaaatgaatggtttcaacaaagatcatttaatacagcagagcatggcatgaccaagcatctttgtaaagtgttagatggaaaatgctgtgtgctgccatggtaatcagaaataataacctgttagggatgtattctaggaaatcagaagtagttctcttttcttgctggattattgcttagataactcttgttttctggtaaaactttagttgtattgccatccactcctttttcaaatgagtttaatgccataaagctgatattctttgtccgattaatttgaaatctgcacagaagctgttttagtcattaatgtgtaacaaaagtagcttatagaatatggactgccttattgctgttgcttatcatttgaaaataaaatccagctcaggttgtaacttgttggtacttgtttagtgagttcgttttggaggttctgaaatacctattaattcttaatattacctctcttggaaagacacaaaaaaagagctgttatttttaggcataagatgacttaggaggcccatagaaacgttctcgtttaaacaacaacaacaaaataaatttatcagcactagaaaaaaaaaaaaaaaa

SEQ ID NO: 57035 - DNA, 2681 bp, Homo Sapiens
tggtatggcagaatacagaaaatgctttattggagacagtcattgtatcaacagtacacttgatctccagtacagacatatggtggaacagaagcctggatacaggactcagactcttactggttggtatcatacgtgatcgtttgtttcagttcatctctaaattgcagtttgccgtgactgtgcttttgacatcatggacacaggaaaaacaacgtcgaaaaacaactgccactttatgtatactcaacattgtcttttctccattcgtgttggtcatcatagttttttctacactactctcttctcccttactccctcttttcacccttcctgtgttcttggtggggtttccccgacctattcagagttggccaggagcagcaggcaccacagcctgtgtgtgtgcagatacagtgtactactaccaaatggtgcccaggttgactgctgtactgcagactgcaatggcagctggaagtttaggtctcctcctacctggatctcattacttgggccgttttcaggatcgtttaatgtggataatgattctggaatgtggctatacttactgctctattaacattaaggggttagaattgcaggaaacatcctgtcatactgcagaagctcgcagagttgatgaagtttttgaagatgcttttgagcaagaatacacaagagtatgttcccttaatgaacactttggaaatgtcttgacaccctgtactgttttgcctgtgaaattgtattctgatgccaggaatgttctatcaggcataattgattctcatgaaaacttaaaagaatttaaaggtgacctcattaaagtacttgtgtggatacttgttcaatactgctccaaaaggcctggcatgaaagagaatgttcacaacactgaaaataaagggaaagcacctctaatgttgcctgctttgaacactttgccacctcccaaatccccagaagacatagacagtttaaattcagaaacttttaatgactggtctgatgataatatttttgatgatgagccaactatcaaaaaagtaatagaagaaaaacatcagttgaaagatttgccaggtacaaatttgtttattccaggatcagtagaatcacagagggttggtgatcattctacaggcactgttcctgaaaacgatctttacaaagcagttctattaggataccctgctgttgacaaaggaaaacaagaggacatgccatatattcctctcatggagttcagttgttcacattctcacttagtatgcttacccgcagagtggaggactagctgtatgcccagttccaaaatgaaggagatgagctcgttatttccagaagactggtaccaatttgttctaaggcagttggaatgttatcattcagaagagaaggcctcaaatgtactggaagaaattgccaaggacaaagttttaaaagacttttatgttcatacagtaatgacttgttatttcagtttatttggaatagacaatatggctcctagtcctggtcatatattgagagtttacagtggtgttttgccttggtctgttgctttggactggctcacagaaaagccagaactgtttcaactagcactgaaagcattcaggtatactctgaaactaatgattgataaagcaagtttaggtccaatagaagactttagagaactgattaagtaccttgaagaatatgaacgtgactggtacattggtttggtatctgatgaaaagtggaaggaagcaattttacaagaaaagccatacttgttttctctggggtatgattctaatatgggaatttacactgggagagtgcttagccttcaagaattattgatccaagtgggaaagttaaatcctgaagctgttagaggtcagtgggccaatctttcatgggaattactttatgccacaaacgatgatgaagaacgttatagtatacaagctcatccactacttttaagaaatcttacggtacaagcagcagaacctcccctgggatatccgatttattcttcaaaacctctccacatacatttgtattagagctcattttgactgtaatgtcatcaaatgcaatgtttttattttttcatcctaaaaaagtaactgtgattcttgtaacttgaggacttctccacacccccattcagatgcctgagaacagctaagctccgtaaagttggttctcttagccatcttaatggttctaaaaaaacagcaaaaacatctttatgtctaagataaaagaactatttggccaatatttgtgccctctggactttagtaggctttggtaaatgtgagaaaacttttgtagaattattatataatgaattttgtaatgctttcttaaatgtgttataggtgaattgccatacaaagttaacagctatgtaatttttacatacttaaaagataaacatatcagtgttctaagtagtgataatggatcctgttgaaggttaacataatgtgtatatatttgtttgaaatataatttatagtattttcaaatgtgctgatttattttgacatctaatatctgaatgtttttgtatcaagtagtttgttttcatagacttcaattcataaactttaaaaaacttttaataaaatattttccttccttttcaaaaaaaagaaaaaaaaaaaaaaaaaaca

SEQ ID NO: 57036 - DNA, 2068 bp, Homo Sapiens; identical to SEQ ID NO: 30782

SEQ ID NO: 57037 - DNA, 1689 bp, Homo Sapiens
agtgcaaagtgcatcccgaaagccccctgtccggagaccccacggctggcacttcgggccccgtatgacctgggacctcgccgtcccgagacctcctgggtccctccgtagctggaagcctccggcccggagcgcggcagccccctgctccgagccctggaccgggactgcccccccacccgagccaggacttcctccctgcctccctgcacctctgccccaaggctgcccggcggccgggatcgccacctcctgccttctcggctgttcggatgttcgccgggctggggccgtgaggcaccgaggaggatcaggaacaccagggtccggccctgcctggggtatttcttcaatggagaagttggtgagtgtagaggaggctgaaaggaggaagagaagcagcagctgaggagacaggtttgagctggctgaagaagacgcgaaagcaggaagaggtctgcccacctatcagagaagcagaaggcacagtgcctctgaccagcatcgtctgtaaaggttaagaaggcttttttgctctgtagcctggacgtactttgaagcccctccccacgatgctgtacgtgcacaatggttactaggcaatccgtacatcaggagaagggacactcttccataaggctgatccccgtaacctaatgaatcctttgtaaaaagtggactcagctaggatgttacaccatcattgtcgaaggaaccctgagctccaggaagagttgcagattcaggccgcggtggctgctggggatgtccacacagtgcgaaagatgctagaacaaggctattccccgaatggccgagatgcgaatggctggactctgcttcatttctctgcagcaagaggaaaggaaagatgtgttcgggtttttctagaacacggagctgatcctacagttaaagacttaatcggaggcttcacggctcttcactatgcagccatgcatggccgggcccgcattgcacgcttgatgttagaatctgaatacaggagcgacatcattaatgcaaaaagcaatgacggctggactcccctccatgtggctgcccactacggcagggactcatttgtccggctcctcctggagttcaaggctgaggttgacccactcagtgataaaggtaccacaccgcttcagctcgccattatccgagagaggtcaagctgtgtgaaaatcctcctggaccacaatgccaacatcgacattcagaatggtttcctgttgcgatacgccgtgatcaaaagcaatcactcttattgccgaatgttccttcagagaggggcagacacaaacttgggtcgcttagaagacggacagactcctttacacttatctgcccttagggatgatgtgctgtgtgcacggatgttatataattacggagcagacacgaacacacggaactatgaaggacagaccccattggctgtttcaataagtatttctggaagtagtcgaccatgtttggatttcttacaagaagtcacaagtatgtaatataattattactttattgcattttttaaaaatttgcatcttctgaggagcttaatgtgtttttgcaacttaagatgactagatattaatcattcctataaccactgcttggtaagcgatgcctcattcttctgaaataaaaaaaaaactttgactgtaaaaaaaaaaaaaaaaa

SEQ ID NO: 57038 - DNA, 6279 bp, Homo Sapiens
gtgtgtgtggaggccagtatgaagctgaaaaagcaggtgacagtgtgtggggctgccatcttctgtgtggcagtcttctcgctctacctcatgctggaccgagtgcaacacgatcccacccgacaccagaatggtgggaacttcccccggagccaaatttctgtgctgcagaaccgcattgagcagctggagcagcttttggaggagaaccatgagattatcagccatatcaaggactccgtgctggagctgacagccaacgcagagggcccgcccgccatgctgccctactacacggtcaatggctcctgggtggtgccaccggagccccggcccagcttcttctccatctccccgcaggactgccagtttgctttggggggccggggtcagaagccagagctgcagatgctcactgtgtcggaggagctgccgtttgacaacgtggatggtggtgtgtggaggcaaggcttcgacatctcctacgacccgcacgactgggatgctgaagacctgcaggtgtttgtggtgccccactctcacaatgacccaggctggatcaagacctttgacaagtactacacagagcagacccaacacatcctcaatagcatggtgtctaagctgcaggaggacccccggcggcgcttcctctgggcagaggtctccttcttcgccaagtggtgggacaacatcaatgtccaaaagagagcggcagtccgaaggctggtgggaaacgggcagctggagattgcgacaggaggctgggtgatgccagatgaggccaattcccactactttgcattgattgaccagctcatcgaaggacaccagtggctggagagaaatcttggtgcaaccccccgctctggctgggcagtggacccctttggatacagctccaccatgccttacctgctgcgccgtgccaacctcaccagcatgctgattcagagagtgcactatgccatcaagaagcactttgctgccacccacagcctagagttcatgtggaggcagacatgggactcggactccagcacagacatcttctgtcacatgatgcccttctacagctatgacgtcccccatacctgtggcccagatcccaagatctgctgccaatttgatttcaaacgcctgcctggtgggcgcatcaactgcccttggaaggtgccaccccgggccatcacagaggccaacgtggcagagagggcagccctgcttctggaccaataccggaagaagtcccagctgttccgaagcaacgtcctcctggtgcctcttggagatgacttccgatatgacaagccccaggagtgggatgcccagttcttcaactaccaacggctctttgacttcttcaacagcaggcctaacctccatgtgcaggcccagtttggcactctttctgactattttgatgccctgtacaagaggacaggggtggagccaggggcccggcctccagggtttcctgtgctgagcggggatttcttctcctatgcggaccgggaggatcattactggacaggctattacacttcccggcccttctacaagagcttagaccgagtcctggaagcccacctgcggggggcagaggttctgtacagcctggctgcagctcacgctcgccgctctggtctggctggccggtacccactgtctgatttcaccctcctgacggaagctcggcgcacattggggctcttccagcatcacgatgccatcactggcacggccaaggaggctgtggtggtggactatggggtcaggcttctgcgctcccttgtcaacctgaagcaggtcatcattcatgcagcccactatctggtgctgggggacaaggagacctaccactttgaccctgaggcgcccttcctccaagtggatgacactcgcttaagtcacgacgccctcccagagcgcacggtgatccagctggattcctcgcccaggtttgtggtcctattcaacccactggaacaggagcgattcagcatggtgtccctgctggtcaactctccccgcgtgcgtgtcctttcggaggagggtcagcccctggccgtgcagatcagcgcacactggagctctgccaccgaggcggtccctgacgtctaccaggtgtctgtgcctgtccgcctgccagccctgggcctgggcgtgctgcagctacagctgggcctggatgggcaccgcacgctgccctcctctgtgcgcatctacctgcacggccggcagctgtccgtcagcaggcacgaagcgtttcctctccgtgtcattgactctggcaccagcgacttcgccctcagcaaccgctacatgcaggtctggttctcaggccttactgggctcctcaagagcatccgaagggtggatgaggagcacgagcagcaggtggacatgcaggtccttgtctatggcacccgtacgtccaaagacaagagtggagcctacctcttcctgcccgatggcgaggccaagccctacgtccccaaggagccccccgtgctgcgtgtcactgaaggccctttcttctcagaggtggttgcgtactatgagcacattcaccaggcggtccggctttacaatctgccaggggtggaggggctgtctctggacatatcatccctggtggacatccgggactacgtcaacaaggagctggccctgcacatccatacagacatcgacagccagggtatcttcttcacagacctcaatggctttcaggtgcagccccgacggtatctgaagaagctccccctccaggccaacttctaccccatgccagtcatggcctatatccaggacgcacagaagcgcctcacgctgcacactgcccaggccctgggtgtctctagcctcaaagatggccagctggaggtgatcttggaccggcggctgatgcaggatgacaaccggggcctaggccaagggctcaaggacaacaagagaacctgcaaccgtttccgcctcctgctagagcggcgaaccgtgggcagtgaggtccaagatagccactctaccagctacccatccctcctcagccacctgacctccatgtacctgaacgccccggcgctcgctctgcctgtagccaggatgcagctcccaggccctggtctgcgctcatttcatcctctggcttcctcactgccctgtgacttccacctgctcaacctacgtacgctccaggctgaggaggacaccctaccctcggcggagaccgcactcatcttacaccgcaagggttttgactgcggcctggaggccaagaacttgggcttcaactgcaccacaagccaaggcaaggtagccctgggcagccttttccatggcctggatgtggtattccttcagccaacctccttgacgttactgtaccctctggcctccccgtccaacagcactgacgtctatttggagcccatggagattgctacctttcgcctccgcttgggttagggcttcttgtggcctgaagagaaagttcattcacagagactgcctcttaacatgaagatcattggacaagccacacgggtatcccatcccgatctgcctcccagaactgtgacacactgggctctgccctcattttctgtttattgctgctgctgtgttttcggcgcaacccacaaacccagtgatgggtaaatagggcagacgccagtgagatcagggagagaaggcccttggtcagagtgggcagtgccaggctctgctttgggttgtgagtggacacccaactgggcacaggctcaggcacccatcctttttccaaacagggatatagaagtggtggaagcagacagaagaggtaagggaggctaagtgggtaacagcccagcatcagggtcactgtggcaacagcaggctctaggggaatcctgtggttatgtagagactccatgtcctggtgtgatgagcaggatcagagtgactctgggaggacaggggtggggacccagagttagcagtggggatggagcagtagaaggaatcactgtttctcctaggagtctgaaggcctcgctgctttctgtgatggctttgcagtaagtgccgcctggcctgcatgcattggctaacaggctgcagaatggcaggaaggactcgctagagattgtcatggccagagatcataggtcacttcaggtagcaagacccctggcaaactgggcacttggcctatgtactgatttgtgggatggtggcaggggtgtggggtccttcaccctgcctgaattctctttggcttctgtgctctgtatgctgctgtccccaagggctctttcttattatggcagggagtggggattggtcctactttctttctctggaaaggaaagcctccaagactccatgtgcttgggcagcttgagaaggcgttcagcaccacgcctagcaggcagaccttgaagcctcacctttagtctatctgcagaggtattcagttcctggcacaggggactaggggcatgtagagtatatgaggaggcagtatggctgtgcaggagccttcatttcagcttcaattaatagggaagaatttatgatagctctatagatgctgaaaaggtatttcgtaagatttaaaatccatcccttattaaaactcttagtaaattaagtctggaaagaaacaccctaatctagataaaggtctgtttcagaaaccaacagtgatggcattctaaagagtcagacgccacaggcattcccattaaagtcagaaactagccaagggcaagctattattcagcagtgtcccggcactactaacccctgcaacaagccagatgaggaacataaggaagaattataattgtcattatttgtagacaataaaactgcctacctgtaaaacctaagaatcaactgaagacctgttaagagtattctgtaagtcaacccaatgatacacatcatgttcctgtccacatactggttttccccaaatcagctgataaattcagtgtaattccaatgagattgaaactttggaattgacagttctaaagtgcatttgggagagtgaatgtgtgagaacactaagaccactctgaacgatgataatgagttggggggtggactgctcgggggtgatcctgccagattcccagaggattctcacgccaccattacctcactcagtgtgacctggagggggtcagacagacgggagagtccagaaacagacccagggctacaggaatttagtatatggtaagagggatgttttaagtggggaaaaaggtggattatttaataaacagcacttttagacaactagctatcaaagctagatctcagctgggtgcgatggctcacgcctgtaatcccggcactttgggaggccaaggtgggtggatcacttgaggtcaggagttcgagaccagcctggccaagatggcgaaaccctgtgtctactaaaaatacaaaaactagccaggaatggtggcgcgcgcctgtaatcccagttacttaggaggctgaggcaggagaatcacatcaacctgggaggcggaggttgcagtgagcttagatcatgccaccatgccactgcactccagcctgggtgacacagccaaaaaaaaaaccactaagttagatctctacctcacagtgtccatacaaattagttccagagggaagatataccacaaaattactcaaaaatttttatacctctggtgtgggacggtcttttctaaactttaacatgagacttaaaagatataataagggaaaagataagcagatttcgcaaccaaaaaatatcgaaagtctctgtgtgatggaaaacatcaaggttaaaacacaaatgacagatatggaagaaaatatttgcagcacataaaaaaatcaacgagtacaattactttaggagaaaagcttgcttcagggtccttagagaaagtcactggggcctgccaagctgccacctaaagacaagagtgagagggctgagttcttccaggtcatcagagttgttgctgcccgtattaggccacacagtggaaccccatttatatcatagcagaagaaataggattatcaatgtgaactgcttagcatggtgcctggtatatacgagagctccacaaatgtgagctataatcctactagtaaaggatgctaagcagttccactgtggcaggtgtcatttgctagtagaatttgtaatcaaacaataggaggggaatctgtgaacgcctagaaaatgagcagaataaaggatattatctttggaagtcttaaaaaaaaaaa

SEQ ID NO: 57039 - DNA, 2634 bp, Homo Sapiens; identical to SEQ ID NO: 30738

SEQ ID NO: 57040 - DNA, 3060 bp, Homo Sapiens
gctggcccggtttcctggcgacgcggccctgcaggcggttgcgttccccgtcgttaccctctttctcttcccgacgcgtgagttaggccgtaatgccttggctgctctcagcccccaagctggttcccgctgtagcaaacgtccgcggcctctcaggatgtatgttgtgttcacagcgaaggtactcccttcagcctgtcccagaaaggaggattccaaaccgatacttaggccagcccagcccctttacacacccacacctcctcagaccaggggaggtaactccaggactatctcaggtggaatatgcacttcgcagacacaaactaatgtctctgatccagaaggaagctcaagggcagagtgggacagaccagacagtggttgtgctctccaaccctacatactacatgagcaacgatattccctatactttccaccaagacaacaatttcctgtacctatgtggattccaagagcctgatagcattcttgtccttcagagcctccctggcaaacaattaccatcacacaaagccatactttttgtgcctcggcgagatcccagtcgagaactttgggatggtccgcgatctggcactgatggagcaatagctctaactggagtagacgaagcctatacgctagaagaatttcaacatcttctaccaaaaatgaaagctgagacgaacatggtttggtatgactggatgaggccctcacatgcacagcttcactctgactatatgcagcccctgactgaggccaaagccaagagcaagaacaaggttcggggtgttcagcagctgatacagcgcctccggctgatcaagtctcctgcagaaattgaacgaatgcagattgctgggaagctgacatcacaggctttcatagaaaccatgttcaccagtaaagcccctgtggaagaagcctttctttatgctaagtttgaatttgaatgccgggctcgtggcgcagacattttagcctatccacctgtggtggctggtggtaatcggtcaaacactttgcactatgtgaaaaataatcaactcatcaaggatggggaaatggtgcttctggatggaggttgtgagtcttcctgctatgtgagtgacatcacacgtacgtggccagtcaatggcaggttcaccgcacctcaggcagaactctatgaagccgttctagagatccaaagagattgtttggccctctgcttccctgggacaagcttggagaacatctacagcatgatgctgaccctgataggacagaagcttaaagacttggggatcatgaagaacattaaggaaaataatgccttcaaggctgctcgaaaatactgtcctcatcatgttggccactacctcgggatggatgtccatgacactccagacatgccccgttccctccctctgcagcctgggatggtaatcacaattgagcccggcatttatattccagaggatgacaaagatgccccagagaagtttcggggtcttggtgtacgaattgaggatgatgtagtggtgactcaggactcacctctcatcctttctgcagactgtcccaaagagatgaatgacattgaacagatatgcagccaggcttcttgaccttcactgcggcccacatgcacctcaggttcaaaatgggtgtcttctggcagccctgcacgtgtgctttctgagtgtctctgtgtgtgcattaatatatgcattccatttgggagcatagcagctgtgtgaatgtatgtaattgtgtgtggggggttttttgttttaagtagttagaagtctgggaaaatgaatttttgaatagtatgttactgcagctttggtaacattaattctatagaattaatgatcagagcaagtttaatttttaaacataaaggtcttggttacacatgtccatgcattccagttaacacatttaaacatatagaaaattcacttcttctttcaagtccttccctttctatacttttgctgagatcaacccaatatcataagaagtttgtgtgatgcctgtatttttagctaattaccaaggtctctgcctatgcaaaaattcatctttcggtgattgtgggcggccaatacataccttctgtaactcctccctacctattctagatcctgcatatctactggagccatatgagccctcaggggcactggtgtcctgcagtcttactagtcagccacagtccaggttccagcaacactagctacctaccaaacaaaacacttctgagcttttcttgccatttggttgcctgggacctggaaagtgtttagattcttgataaagatggaaatggaagagaaagaaaattatatatgtatatactaaagatccagacatcagggctgggcacagcggttccgcctgtaatcccagcactttgggaggtccaggcaggtggatctcttgagaccaggaggtcaagaccagcctggccaacgtggtgaaacactgtctctactaaaaatacaaaaatgagctgggtgtgatgatacatgcctgtaatcctggctacttgggaggctgaggcatgagaattgcttgaacctgggaggtggaggttgcagtgagctgagctcatgcgactgcactccagcctgggtgactgagcaagactctgcctcaaaaaaacaaataaataaataaaatcctgacatcctgccatcttttctcttcaatttaaagttgatttcttaatgatgacttcaaaaattaataaaaagaaaagaaaaaaatgatttctggccgggcgtggtggctcaagcctgtaatcccagcactttgggaggccgaggtgggcggatcacgaggtcaggagattgagacctcctggctaacacggtgaaaccccgtctttactaaaaatacaaaaaaaattagctgggcgtggtggcggatgcctgtagtcccagctactcaggaggctgaggcaggagaatggcgtgaacccagaaggcagagcttgcagtgagccaagatcgcgccactgcactccagcctgggtgacagagcgagactccgtctcaaaaa

SEQ ID NO: 57041 - DNA, 2844 bp, Homo Sapiens; identical to SEQ ID NO: 30392

SEQ ID NO: 57042 - DNA, 3152 bp, Homo Sapiens
ggcttctcaggaccgggctggaacgtgcagctcctggccgggacactctgtgctttgcggggaagggaagtggcggagcccgaggatccgctgccgctcgggactgagcccgccacgcaggcgcctgtgccagcgtcgccattgttgcctgtggccttagggccgctccggctgcccgtcggccgggtcccagcgacagggtctcttatccatccctgcaagttctgggctcagaatttgtcactaaggctgctaactctaccttgattctgttctgccctcggctgcagcagcctttgatatagtgtccttgtgactctagcatgagacttcaagcagttggctcactactggagaaataaaggatattgccagattgactctcctgtctgtagcaatgttagcctcaagcaagaggatgaacagttcttcacgttctcaaatccttctaaggtggaagtcagacaaggctcagagtggaccctacaatgttgagaaggaaatccttacttcaagattcttgcgtgacactgagacctgtcgacagaattttaggaattttccatacccagacctggctggtcctcgaaaggcattgagtcaactccgagagctctgccttaagtggctgagacctgagattcactcaaaggaacaaattttggagctgctggtgctggagcaattcctgaccatcctgcctggtgaggttaggacttgggtaaagtcccagtatccagagagcagcgaggaagcagtgactctggtggaggatttgactcagattctagaagaggaagctcctcaaaactctaccctttcccaagataccccagaggaagaccccagaggaaaacatgctttccagacaggatggctaaatgacttggtgaccaaagaatcgatgacattcaaagatgtggctgtagacatcacccaggaggactgggagttaatgcgtcctgtgcagaaggaattatacaagactgtgacgttacagaactattggaacatggtttctctgggacttacagtgtacagaccaactgtgattcccatattggaagaaccatggatggtgataaaagaaattttagaaggccctagtccagaatgggaaactaaagcccaagcatgtactccagtggaggatatgtctaaactcacaaaggaagaaacccataccatcaaattagaagactcatatgactacgatgatagactagagaggcgaggaaaaggtggcttctggaaaattcacactgatgaaagaggtttcagtttgaagtcagtcctttcacaagaatatgatcctacagaagaatgtcttagtaaatatgatatatatagaaataattttgaaaagcattcaaacctaattgtacagtttgatacccaattagataataaaacttctgtgtataatgaaggcagggcaaccttcaatcatgtctcatatggtattgtacataggaaaatacttcctggagagaagccttacaagtgtaatgtgtgtgggaaaaaatttaggaaatacccatccctcctgaaacaccaaagtacccatgccaaagagaaatcgtatgaatgtgaagaatgtgggaaagagtttaggcatatctcatcccttattgcacatcagagaatgcacactggagaaaaaccatatgaatgccaccagtgtggtaaagccttcagccagcgtgcacaccttactatacatcagagaattcatactggagagaaaccctataagtgtgatgactgtgggaaagacttcagtcagcgtgcacaccttaccatccatcaaaggacacatactggagagaaaccatataaatgcttggaatgtggtaaaaccttcagtcatagttcatcactgattaatcatcagagagttcatactggagaaaaaccttatatatgcaatgaatgtgggaagactttcagtcagagtacacaccttcttcagcatcaaaaaatacatactgggaagaaaccatataaatgcaatgaatgttggaaagtgtttagtcagagtacttaccttattcgacatcagagaattcattctggagagaagtgttataaatgtaatgaatgtggaaaagcctttgctcattcctcaacccttattcaacatcaaaccactcacactggagagaaatcctatatatgtaatatatgtgggaaagccttcagccagagtgcaaatcttactcaacatcatagaacacatactggagagaaaccatataaatgcagtgtgtgtgggaaagcattcagccagagtgtgcaccttactcaacatcagaggattcataatggagaaaaaccctttaaatgcaatatatgtgggaaagcatatagacaaggcgcaaatcttactcagcatcaaaggattcatactggagaaaaaccctataaatgtaatgaatgtgggaaagctttcatttattcctcatcacttaatcaacatcagagaactcatactggagagagaccctataaatgtaatgaatgtgataaggattttagccagagaacatgccttattcaacaccagagaattcacacaggagagaaaccctatgcatgtcgtatatgtggtaaaaccttcacccagagtacaaaccttattcagcatcaacgtgttcatacaggtgccaaacatcgtaattaatggataagggaaacttcaattcggttttacaactttgtttcaattttgttttgtgcattctatgtgtcagaacattcagaagaagtctgaagaagtgcaatatgttagatactcagcagaagtatcagaagtagtggtatggatataacctatttagatttaatgtgaaatttaagaaggaaacttgacttcttaaccttaatttgatatgattttaattcattacagaaagaaaccctgtgaagggtattcaaaaacataactcatcaactctctatttcaagtacacttatcctttggtatactcgggggattggttccaggaccacccatgtatacgaaaatctacccatactcaagttgcacggtcagcctggtggaacctgtgtatatgaaaagccctacatctatgcaggtttcccatccctgaataatgtgctttcaaactctgttcagttgaaaaaaaaaa

SEQ ID NO: 57043 - DNA, 2175 bp, Homo Sapiens
gcacactgaagagtacgtcttcgggtctacccctaatcacataatggctgtgtttaatcagaagtctgtctcggacatgattaaagagtttcgaaaaaattggcgtgctctttgtaactctgagagaactactctatgtggtgcagactccatgctcttggcattgcagctttctatggcagagaacaacaaacagtggagaatttacagtctctctcagtgatgttttattgacatggaaatacttgctccatgagaaattgaacttaccagttgaaaacatggacgtgactgaccattatgaggacgttaggaagatttatgatgatttcttgaagaacagtaatatgttagatctgattgatgtttatcaaaaatgtagggctttgacttctaattgtgaaaattataacacagtatctcctagtcaactactggattttctgtctggcaaacagtatgcagtaggtgatgaaactgatctttctataccaacatcaccaacaagtaaatacaaccgtgataatgaaaaggtgcagctgctagcaaggaaaattatcttttcatatttaaatctgctagtgaattcaaagaatgacctggctgtggcttatattctcaatattcctgatagaggactaggaagagaagccttcactgatttgaaacatgctgctcgagagaaacaaatgtctatctttttggtggccacgtcttttattagaacaatagagcttggagggaaaggatatgcaccaccaccatcagatcctttaaggacacatgtaaagggattgtctaattttattaatttcattgacaaattagatgagattcttggagaaataccaaacccaagcattgcagggggtcaaatactgtcagtgataaagatgcaactgattaaaggccaaaacagcagggatcctttttgcaaagcaatagaggaagttgctcaggatttggatttgaggattaaaaatattatcaattctcaagaaggtgttgtagctcttagcaccactgacatcagtcctgctcggccaaaatctcatgccataaaccatggtactgcatactgtggcagagatactgtgaaagccttattagttcttttggacgaagaagcagctaatgctcctaccaaaaacaaagcagagcttttatatgatgaggaagacacaatccatcatcatggaacgtctattcttacactttttaggtctcccacacaggtgaataatttgataaaacccctaagagaacgcatctgtgtgtcaatgcaagagaaaaaaattaagatgaagcaaactttaattagatcccaatttgcttgtacttataaagatgactacatgataagcaaggataattggaataatgttaatttagcatcaaagcctttgtgtgttctttacatggaaaatgacctttctgagggtgtaaatccatctgttggaagatcaacaattggaacgagttttggaaatgttcatctggacagaagtaaaaatgaaaaagtatcaagaaaatcaaccagtcagacaggaaataaaagctcaaaaaggaaacaggtggatttggatggtgaaaatattctctgtgataatagaaatgaaccacctcaacataaaaatgctaaaatacctaagaaatcaaatgattcacagaatagattgtacggcaaactagctaaagtagcaaaaagtaataaatgtactgccaaggacaagttgatttctggccaggcaaagttaactcagttttttagactataaatttgtgtcttatatgctttaggtttatgcatctataaaccattcaccaaagacatgcttaatttttaagagatcaaggtgtaaattatgatgatttattattttggtctacagtgtatgtaaggttagtatgttaagcactgtttttgactttttaaaaataccttagatgcaaatttataggagaaaaaacactttcagataagaggtgtttgctgggatggaagaactacctggcatgtaagaaatatcgtcagtcgtcctaatgcatattgtgactgtttgcatatacttctgtttataaaagtatcagttttacttttcagaggatttgtaagaatcatttaaattttcattgaaataaacgacaagtcacattgaaaaaaaaaaaaaaaaa

SEQ ID NO: 57044 - DNA, 1309 bp, Homo Sapiens
tatctatgtaacaaatcgcagcacaggagtcccctgggctccctcaggctctggtatgacatatttgagccatataaattcagcttctcctctggcatctgttagccgactcacttgcaactccacctcagcagtggtctctcagtcctctcaaagcaaggaaagagtactgtgtgctgagagaccatggcaaagaatcctccagagaattgtgaagactgtcacattctaaatgcagaagcttttaaatccaagaaaatatgtaaatcacttaagatttgtggactggtgtttggtatcctgaccctaactctaattgtcctgttttgggggagcaagcacttctggccggaggtacccaaaaaagcctatgacatggagcacactttctacagcagtggagagaagaagaagatttacatggaaattgatcctgtgaccagaactgaaatattcagaagcggaaatggcactgatgaaacattggaagtacacgactttaaaaacggatacactggcatctacttcgtgggtcttcaaaaatgttttatcaaaactcagattaaagtgattcctgaattttctgaaccagaagaggaaatagatgagaatgaagaaattaccacaactttctttgaacagtcagtgatttgggtcccagcagaaaagcctattgaaaaccgagattttcttaaaaattccaaaattctggagatttgtgataacgtgaccatgtattggatcaatcccactctaatatcagtttctgagttacaagactttgaggaggagggagaagatcttcactttcctgccaacgaaaaaaaagggattgaacaaaatgaacagtgggtggtccctcaagtgaaagtagagaagacccgtcacgccagacaagcaagtgaggaagaacttccaataaatgactatactgaaaatggaatagaatttgatcccatgctggatgagagaggttattgttgtatttactgccgtcgaggcaaccgctattgccgccgcgtctgtgaacctttactaggctactacccatatccatactgctaccaaggaggacgagtcatctgtcgtgtcatcatgccttgtaactggtgggtggcccgcatgctggggagggtctaataggaggtttgagctcaaatgcttaaactgctggcaacatataataaatgcatgctattcaatgaatttctgcctatgaggcatctggcccctggtagccagctctccagaattacttgtaggtaattcctctcttcatgttctaataaacttctacattatcaaaaaa

SEQ ID NO: 57045 - DNA, 4485 bp, Homo Sapiens
gtagacagatccaggctcaccagtcctgtgccactgggcttttggcgttctgcacaaggcctacccgcagatgccatgcctgctcccccagcctaatgggctttgatgggggaagagggtggttcagcctctcacgatgaggaggaaagagcaagtgtcctcctcggacattctccgggttgtgaaatgtgctcgcaggaggcttttcaggcacagaggagccagctggtcgagctgctggtctcagggtccctggaaggcttcgagagtgtcctggactggctgctgtcctgggaggtcctctcctgggaggactacgagggcttccacctcctgggccagcctctctcccacttggccaggcgccttctggacaccgtctggaataagggtacttgggcctgtcagaagctcatcgcggctgcccaagaagcccaggccgacagccagtcccccaagctgcatggctgctgggacccccactcgctccacccagcccgagacctgcagagtcaccggccagccattgtcaggaggctccacagccatgtggagaacatgctggacctggcatgggagcggggtttcgtcagccagtatgaatgtgatgaaatcaggttgccgatcttcacaccgtcccagagggcaagaaggctgcttgatcttgccacggtgaaagcgaatggattggctgccttccttctacaacatgttcaggaattaccagtcccattggccctgcctttggaagctgccacatgcaagaagtatatggccaagctgaggaccacggtgtctgctcagtctcgcttcctcagtacctatgatggagcagagacgctctgcctggaggacatatacacagagaatgtcctggaggtctgggcagatgtgggcatggctggacccccgcagaagagcccagccaccctgggcctggaggagctcttcagcacccctggccacctcaatgacgatgcggacactgtgctggtggtgggtgaggcgggcagtggcaagagcacgctcctgcagcggctgcacttgctgtgggctgcagggcaagacttccaggaatttctctttgtcttcccattcagctgccggcagctgcagtgcatggccaaaccactctctgtgcggactctactctttgagcactgctgttggcctgatgttggtcaagaagacatcttccagttactccttgaccaccctgaccgtgtcctgttaacctttgatggctttgacgagttcaagttcaggttcacggatcgtgaacgccactgctccccgaccgaccccacctctgtccagaccctgctcttcaaccttctgcagggcaacctgctgaagaatgcccgcaaggtggtgaccagccgtccggccgctgtgtcggcgttcctcaggaagtacatccgcaccgagttcaacctcaagggcttctctgaacagggcatcgagctgtacctgaggaagcgccatcatgagcccggggtggcggaccgcctcatccgcctgctccaagagacctcagccctgcacggtttgtgccacctgcctgtcttctcatggatggtgtccaaatgccaccaggaactgttgctgcaggagggggggtccccaaagaccactacagatatgtacctgctgattctgcagcattttctgctgcatgccacccccccagactcagcttcccaaggtctgggacccagtcttcttcggggccgcctccccaccctcctgcacctgggcagactggctctgtggggcctgggcatgtgctgctacgtgttctcagcccagcagctccaggcagcacaggtcagccctgatgacatttctcttggcttcctggtgcgtgccaaaggtgtcgtgccagggagtacggcgcccctggaattccttcacatcactttccagtgcttctttgccgcgttctacctggcactcagtgctgatgtgccaccagctttgctcagacacctcttcaattgtggcaggccaggcaactcaccaatggccaggctcctgcccacgatgtgcatccaggcctcggagggaaaggacagcagcgtggcagctttgctgcagaaggccgagccgcacaaccttcagatcacagcagccttcctggcagggctgttgtcccgggagcactggggcctgctggctgagtgccagacatctgagaaggccctgctccggcgccaggcctgtgcccgctggtgtctggcccgcagcctccgcaagcacttccactccatcccgccagctgcaccgggtgaggccaagagcgtgcatgccatgcccgggttcatctggctcatccggagcctgtacgagatgcaggaggagcggctggctcggaaggctgcacgtggcctgaatgttgggcacctcaagttgacattttgcagtgtgggccccactgagtgtgctgccctggcctttgtgctgcagcacctccggcggcccgtggccctgcagctggactacaactctgtgggtgacattggcgtggagcagctgctgccttgccttggtgtctgcaaggctctgtatttgcgcgataacaatatctcagaccgaggcatctgcaagctcattgaatgtgctcttcactgcgagcaattgcagaagttagctctattcaacaacaaattgactgacggctgtgcacactccatggctaagctccttgcatgcaggcagaacttcttggcattgaggctggggaataactacatcactgccgcgggagcccaagtgctggccgaggggctccgaggcaacacctccttgcagttcctgggattctggggcaacagagtgggtgacgagggggcccaggccctggctgaagccttgggtgatcaccagagcttgaggtggctcagcctggtggggaacaacattggcagtgtgggtgcccaagccttggcactgatgctggcaaagaacgtcatgctagaagaactctgcctggaggagaaccatctccaggatgaaggtgtatgttctctcgcagaaggactgaagaaaaattcaagtttgaaaatcctgaagttgtccaataactgcatcacctacctaggggcagaagccctcctgcaggcccttgaaaggaatgacaccatcctggaagtctggctccgagggaacactttctctctagaggaggttgacaagctcggctgcagggacaccagactcttgctttgaagtctccgggaggatgttcgtctcagtttgtttgtgagcaggctgtgagtttgggccccagaggctgggtgacatgtgttggcagcctcttcaaaatgagccctgtcctgcctaaggctgaacttgttttctgggaacaccataggtcacctttattctggcagaggagggagcatcagtgccctccaggatagacttttcccaagcctacttttgccattgacttcttcccaagattcaatcccaggatgtacaaggacagcccctcctccatagtatgggactggcctctgctgatcctcccaggcttccgtgtgggtcagtggggcccatggatgtgcttgttaactgagtgccttttggtggagaggcccggcctctcacaaaagaccccttaccactgctctgatgaagaggagtacacagaacacataattcaggaagcagctttccccatgtctcgactcatccatccaggccattccccgtctctggttcctcccctcctcctggactcctgcacacgctccttcctctgaggctgaaattcagaatattagtgacctcagctttgatatttcacttacagcacccccaaccctggcacccagggtgggaagggctacaccttagcctgccctcctttccggtgtttaagacatttttggaaggggacacgtgacagccgtttgttccccaagacattctaggtttgcaagaaaaatatgaccacactccagctgggatcacatgtggacttttatttccagtgaaatcagttactcttcagttaagcctttggaaacagctcgactttaaaaagctccaaatgcagctttaaaaaattaatctgggccagaatttcaaacggcctcactaggcttctggttgatgcctgtgaactgaactctgacaacagacttctgaaatagacccacaagaggcagttccatttcatttgtgccagaatgctttaggatgtacagttatggattgaaagtttacaggaaaaaaaattaggccgttccttcaaagcaaatgtcttcctggattattcaaaatgatgtatgttgaagcctttgtaaattgtcagatgctgtgcaaatgttattattttaaacattatgatgtgtgaaaactggttaatatttataggtcactttgttttactgtcttaagtttatactcttatagacaacatggccgtgaactttatgctgtaaataatcagaggggaataaactgttgagtcaaaac

SEQ ID NO: 57046 - DNA, 4148 bp, Homo Sapiens
cggcggcgctttgcggccggtcgtgcgggtcgggcgcgggcgggcgcggcggcagtggcgcgcacaggtgattgactggccagctgcctgaaggagcgccaggtcctccttgctggcaggtggcgaagcccattggggcggcggtgcagaccgcggcggcggctgcggcggtctggctcgggaggcgttcctggggccaaggccatggccccgcggctgcagctggagaaggcggcctggcgctgggcggagacggtgcggcccgaggaggtgtcgcaggagcacatcgagaccgcttaccgcatctggctggagccctgcattcgcggcgtgtgcagacgaaactgcaaaggaaatccgaattgcttggttggtattggtgagcatatttggttaggagaaatagatgaaaatagttttcataacatcgatgatcccaactgtgagaggagaaaaaagaactcatttgtgggcctgactaaccttggagccacttgttatgtcaacacatttcttcaagtgtggtttctcaacttggagcttcggcaggcactctacttatgtccaagcacttgtagtgactacatgctgggagacggcatccaagaagaaaaagattatgagcctcaaacaatttgtgagcatctccagtacttgtttgccttgttgcaaaacagtaataggcgatacattgatccatcaggatttgttaaagccttgggcctggacactggacaacagcaggatgctcaagaattttcaaagctctttatgtctctattggaagatactttgtctaaacaaaagaatccagatgtgcgcaatattgttcaacagcagttctgtggagaatatgcctatgtaactgtttgcaaccagtgtggcagagagtctaagcttttgtcaaaattttatgagctggagttaaatatccaaggccacaaacagttaacagattgtatctcggaatttttgaaggaagaaaaattagaaggagacaatcgctatttttgcgagaactgtcaaagcaaacagaatgcaacaagaaagattcgacttcttagccttccttgcactctgaacttgcagctaatgcgttttgtctttgacaggcaaactggacataagaaaaagctgaatacctacattggcttctcagaaattttggatatggagccttatgtggaacataaaggtgggtcctacgtgtatgaactcagcgcagtcctcatacacagaggagtgagtgcttattctggccactacatcgcccacgtgaaagatccacagtctggtgaatggtataagtttaatgatgaagacatagaaaagatggaggggaagaaattacaactagggattgaggaagatctagcagaaccttctaagtctcagacacgtaaacccaagtgtggcaaaggaactcattgctctcgaaatgcatatatgttggtttatagactgcaaactcaagaaaagcccaacactactgttcaagttccagcctttcttcaagagctggtagatcgggataattccaaatttgaggagtggtgtattgaaatggctgagatgcgtaagcaaagtgtggataaaggaaaagcaaaacacgaagaggttaaggagctgtaccaaaggttacctgctggagctgagccctatgagtttgtctctctggaatggctgcaaaagtggttggatgaatcaacacctaccaaacctattgataatcacgcttgcctgtgttcccatgacaagcttcacccggataaaatatcaattatgaagaggatatctgaatatgcagctgacattttctatagtagatatggaggaggtccaagactaactgtgaaagccctgtgtaaggaatgtgtagtagaacgttgtcgcatattgcgtctgaagaaccaactaaatgaagattataaaactgttaataatctgctgaaagcagcagtaaagggcagcgatggattttgggtggggaagtcctccttgcggagttggcgccagctagctcttgaacagctggatgagcaagatggtgatgcagaacaaagcaacggaaagatgaacggtagcaccttaaataaagatgaatcaaaggaagaaagaaaagaagaggaggaattaaattttaatgaagatattctgtgtccacatggtgagttatgcatatctgaaaatgaaagaaggcttgtttctaaagaggcttggagcaaactgcagcagtactttccaaaggctcctgagtttccaagttacaaagagtgctgttcacagtgcaagattttagaaagagaaggggaagaaaatgaagccttacataagatgattgcaaacgagcaaaagacttctctcccaaatttgttccaggataaaaacagaccgtgtctcagtaactggccagaggatacggatgtcctctacatcgtgtctcagttctttgtagaagagtggcggaaatttgttagaaagcctacaagatgcagccctgtgtcatcagttgggaacagtgctcttttgtgtccccacgggggcctcatgtttacatttgcttccatgaccaaagaagattctaaacttatagctctcatatggcccagtgagtggcaaatgatacaaaagctctttgttgtggatcatgtaattaaaatcacgagaattgaagtgggagatgtaaacccttcagaaacacagtatatttctgagcccaaactctgtccagaatgcagagaaggcttattgtgtcagcagcagagggacctgcgtgaatacactcaagccaccatctatgtccataaagttgtggataataaaaaggtgatgaaggattcggctccggaactgaatgtgagtagttctgaaacagaggaggacaaggaagaagctaaaccagatggagaaaaagatccagattttaatcaaagcaatggtggaacaaagcggcaaaagatatcccatcaaaattatatagcctatcaaaagcaagttattcgccgaagtatgcgacatagaaaagttcgtggtgagaaagcacttctcgtttctgctaatcagacgttaaaagaattgaaaattcagatcatgcatgcattttcagttgctccttttgaccagaatttgtcaattgatggaaagattttaagtgatgactgtgccaccctaggcacccttggcgtcattcctgaatctgtcattttattgaaggctgatgaaccaattgcagattatgctgcaatggatgatgtcatgcaagtttgtatgccagaagaagggtttaaaggtactggtcttcttggacattaatctttgaatacttgctgactgctaagaaatgaccagaggggaagaggagtttgacatgttagggcattaaagcaaaggtggatttaagaattaaaccattacatgccccttccaaaaggcagaaatccattcaaacgtgactgtcccaaatgccttatgtcaaataaagcagattgcactgatggacatcagacttgaaggaaatgtttccaattttatatttaaggggggtggtgggtgggagggggcaagtaaagacggaacaagtttagtagcagtaatagtaaatcatgtttacatatgagatttatagtcgtgggaggggaataaagttctgttatatttccttgctcgagtttcataccagatgcgttggtccataaaggattgtatcaagtagatgggacaacattctgctctgaacgaaaagtaattttagagacataacctgcttaccaatgcctgtctttgattcatattctactttcaataaagcatgaaagtgaagaacttgtcctaagtgtggaaaagtgtcttcagatttagactcttctccatgtcagctgcagcgccacccgccttacacctgcccggccgtctgtctcttggtattgggtaaaggagggggcacctgcatgtctcctgcaatgagcaaggaattatgtctcatgttttgacttcagaggctttttgctttggtgcatttcagaaaggatggagaacatttattatgtgtgaaagcatcctcttccggttttgctgttattcaaaagtgggaaatgtacctggcacgtttgaaaataaaaaatctgactacctatcaaaaaaaaaaaaaa

SEQ ID NO: 57047 - DNA, 1790 bp, Homo Sapiens
ccatttctagggttggaccgagcaggcacgggcggtcagctgggccgcagctcctccggctctgcagggtcacggaggaagccagctcccctagtccaggccgagcttgcacttgcgtcttgtctgctgctgctgaaccaagatttagctgtgcgccctccttgcagtctcctggaaccagcaggaggaaacatgggggatactggcctgagaaagcggagagaggatgagaagtcgatccagagccaagagcctaagaccaccagtctccaaaaggagctgggcctcatcagtggcatctccatcatcgtgggcaccatcattggctctgggatcttcgtttcccccaagtctgtgctcagcaacacggaagctgtggggccctgcctcatcatatgggcggcttgcggggtcctcgcgacgctgggtgccctgtgctttgcggagcttggcacaatgatcaccaagtcagggggagagtatccctacctgatggaggcctacgggcccatccccgcctacctcttctcctgggccagcctgatcgtcattaagcccacgtccttcgccatcatctgcctcagcttctccgagtatgtgtgtgcgcccttctatgtgggctgcaagcctcctcaaatcgttgtgaaatgcctggccgccgccgccatcttgttcatctcgacagtgaactcactgagcgtgcggctgggaagctacgtccagaacatcttcaccgcggccaagctggtgatcgtggccatcatcatcatcagcgggctggtgctcctggcccaaggaaacacaaagaattttgataattctttcgagggcgcccagctgtctgtgggagccatcagcctggcgttttacaatggactctgggcctatgatggatggaatcaactcaattacatcacagaagaacttagaaacccttacagaaacctgcctttggccattatcatcgggatccccctggtgacggcgtgctacatcctcatgaacgtgtcctacttcaccgtgatgactgccaccgaactcctgcagtcccaggcggtggctgtgacatttggtgaccgtgttctctatcctgcttcttggatcgttccactttttgtggcattttcaaccatcggtgctgctaacgggacctgcttcacagcgggcagactcatttacgtggcgggccgggagggtcacatgctcaaagtgctttcttacatcagcgtcaggcgcctcactccagcccccgccatcatcttttatggtatcatagcaacgatttatatcatccctggtgacataaactcgttagtcaattatttcagctttgccgcatggctgttttatggcctgacgattctaggactcatcgtgatgagatttacaaggaaagagctggaaaggcctatcaaggtgcccgtagtcattcccgtcttgatgacactcatctctgtgtttttggttctggctccaatcatcagcaagcccacctgggagtacctctactgtgtgctgtttatattaagcggccttttattttacttcctgtttgtccactacaagtttggatgggctcagaaaatctcaaagccgattaccatgcaccttcagatgctaatggaagtggtcccaccggaggaagaccctgagtaacaagctccgtctcttgtagccaagtcagctgaatttattttcttaagcaatatttgtggttatttcttcctttttttcttacgaataaaatatactcagatgttaaaaaaaaaaaaaaaaaaaaaaaaaaaaaa

SEQ ID NO: 57048 - DNA, 3839 bp, Homo Sapiens; identical to SEQ ID NO: 30584

SEQ ID NO: 57049 - DNA, 4057 bp, Homo Sapiens
ggtgcgggctgcgagcgggacccgcggagctgcgctgtcctcgacgcctccgccaggcgcgggccgaggagcctccaagagctggcccggcccccggccgccgccgcccaaccccgggcatctgccccgcgccgttgtccccgcggcttcgggccggcgggaccgccccgtcccttccaggggtgacccgggggtcgcgggtgggacggcgcctgcggccgagtctggggggcgccgggtgtcgggtcgggaagcggccgccgcgactcttgcctcccgggcgtcgttgctccacgggcctgcctccacccgcggggacaggtgccccggctggggtctgttgggaagatggcgaccccgggcatgagctggcagcagcactattacggcggctcggcggccaaattcgcgccctcgccggccaccgcacagctggctgggcacagcatggactacagccaggagatgcacctgaaattgagcaagaaaatcgcccagctcaccaaggtaatatatgctttaaacactaaaaatgatgagcatgaatctgcaattcaagccctcaaagatgctcatgaagaagaaattcaacaaattcttgctgaaacaagagaaaaaatattgcagtataaaagcaaagtaacagaggagctagaccttagaagaaagattcaagttttagaatcatcattagaagatcacataaaaatgaagcagcaggctttgacagaatttgaagcttataagcacagagttgaggacatgcaactttgtgcagaagcccagcatgtccaacgcatagtgaccatgtctagagaagtcgaagagattagaaggaaatttgaagaaaaattacggagctttggacaacttcaagtacagtttgaaaaagacaaacgattggcattggaagacttgcaagctgctcacagacaggagatacaagagctattgaagtcacagcaggatcacagtgcctcagtaaataaaggccaggaaaaggcagaggaactacacagaatggaggtggagtccctaaacaaaatgcttgaggagctaagacttgaacggaagaaactaattgaggattatgaaggcaagttgaataaagctcagtccttttatgaacgtgagcttgatactttgaaaaggtcacagctttttacagcagaaagcctacaggccagcaaagaaaaggaagctgatcttagaaaagaatttcagggacaagaagcaattttacgaaaaactataggaaaattaaagacagagttacagatggtacaggatgaagctggaagtcttcttgacaaatgccaaaagcttcagacggcacttgccatagcagagaacaatgttcaggttcttcaaaaacagcttgatgatgccaaggagggagaaatggccctattaagcaagcacaaagaagtggaaagtgagctagcagctgccagagaacgtttacaacagcaagcttcagatcttgtcctcaaagctagtcatattggaatgcttcaagcaactcaaatgacccaggaagttacaattaaagatttagaatcagaaaaatcgagagtcaatgagagattatctcaacttgaagaggaaagagcttttttgcgaagcaaaacccaaagtctggatgaagagcagaagcaacagattctagaactggagaagaaagtaaatgaagcaaagagaactcagcaagaatattatgaaagggaacttaaaaacctgcaaagtagattggaagaggaggtgactcaattaaacgaggcccattctaagactttggaagaattagcttggaagcaccatatggcaattgaagctgtccacagtaatgcaattagggataagaaaaaactgcaaatggatttggaagaacaacataacaaagataaactaaacctggaagaggataaaaatcagcttcaacaagagctagaaaacctaaaggaagtactggaagacaagttgaatacagccaatcaagagattggccacctccaagatatggtaaggaaaagtgaacaaggtcttggctctgcagaaggacttattgctagtcttcaggactcccaggaaaggcttcagaatgagcttgacttgactaaagacagcctaaaggagaccaaggatgctctattaaatgtggagggtgagctagaacaagaaaggcaacagcatgaagaaacaattgctgccatgaaagaagaagagaagctcaaagtggacaaaatggcccatgacttagaaattaagtggactgaaaatcttagacaagagtgttctaaacttcgtgaagagttaaggcttcaacatgaagaggataagaagtcagcaatgtctcaacttttgcagttgaaagatcgagagaaaaatgcagcaagagattcatggcagaagaaagtagaagatctcttaaaccagatttccttgctgaaacagaatctggagatacagctttcccagtctcagacttctttgcaacaactgcaagcccagtttacgcaagaacgacagcggcttacgcaagagcttgaagaattagaggagcaacatcagcaaagacacaaatcattaaaagaagcacatgtccttgcatttcaaactatggaagaggaaaaggaaaaggagcaaagagctcttgaaaatcatttacaacagaagcattctgcagagcttcaatcactaaaagatgcacacagagagtcaatggagggcttccggatagaaatggaacaggaacttcagactcttcggtttgaattagaagatgaaggaaaggctatgcttgcttccttgcgctcagaactcaaccatcaacatgcagctgcaattgatttgttacggcataatcatcatcaagaattggcagctgctaaaatggaattagagagaagcatagacatcagcagaagacagagtaaggagcacatatgtagaattacagatctacaagaggaattaagacacagagagcatcacatctctgaattggataaggaggttcagcaccttcatgagaatataagtgccctaaccaaagaactggaatttaaggggaaagaaattctcagaatacgaagtgaatctaaccaacagataaggttgcatgaacaagatttaaacaagagacttgaaaaagagttggatgtcatgacagcagaccacctcagagagaaaaatatcatgcgggcagattttaataagactaacgagctactcaaggaaataaatgccgctttacaagtgtcattagaagaaatggaagaaaaatatctaatgagagaatcaaaaccagaagatatacagatgattacagaattaaaagccatgcttacagaaagagaccagatcataaagaaactaattgaggataataagttttatcagctggaattagtcaatcgagaaactaacttcaacaaagtgtttaactcaagtcctactgttggtgttattaatccattggctaagcaaaagaagaagaatgataaatcaccaacaaacaggtttgtgagtgttcccaatctaagtgctctggaatctggtggagtgggcaatggacatcctaaccgcctggatcccattcctaattctccagtccacgatattgagttcaacagcagcaaaccacttccacagccagtgccacctaaagggcccaagacatttttgagtcctgctcagagtgaagcttctccagtggcttctccagatccccagcgccaggagtggtttgcccggtacttcacattctgaaagaattgtgttggcacagctctgtatagactgttactaagagcatgactttatacagattgttatgtaaataggctttcctatgtcaaacactgtgaatgagaaagtatttgtctctccaacttgaaaatgcactgtatttcctgtgatatttattggaatcattctataaggtactatattatgtgtgtaattataactgttatttttatttgagatggaagagtctttaacctttgtaattactgcataataaattttgttagaatcaaaaaaaaaaaaaaaa

SEQ ID NO: 57050 - DNA, 1641 bp, Homo Sapiens; identical to SEQ ID NO: 29799

SEQ ID NO: 57051 - DNA, 4067 bp, Homo Sapiens
aggtccctgcggatgtgatggcccagctatggctgtcctgcttcctccttcctgccctcgtggtgtctgtggcagccaacgtggccccgaagttcctagccaacatgacgtcagtgatcctgcctgaggacctgcctgtgggtgcccaggccttctggttggtagcggaagaccaggacaatgaccctctgacctatgggatgagcggccccaatgcctacttcttcgctgtcactccgaaaactggggaagtgaagctggccagcgctctggactacgagacactctacacattcaaagtcaccatctccgtgagcgacccctacatccaggtgcagagggagatgctggtgattgtggaagatagaaacgacaacgcacccgttttccagaacaccgctttctccaccagcatcaacgagaccctgcccgtgggcagtgtggtgttctccgtgctggccgtggataaagacatggggtctgcaggcatggtcgtgtactccatagagaaggtcatccctagcactggggacagcgagcatctcttccggatcctggccaatggctccatcgtcctcaatggcagcctcagctacaacaacaagagcgctttctaccagctggagctgaaggcctgtgacttgggcggcatgtaccacaacaccttcaccatccagtgctccctgcctgtcttcctgtccatctccgtggtggaccagcctgaccttgacccccagtttgtcagggagttttactcggcctctgtggctgaggatgcagccaagggaacctcggtgctgacggtggaggctgtggatggcgacaaaggcatcaatgaccctgtgatctacagcatctcctactccacgcggcccggctggtttgacatcggggcagatggggtgatcagggtcaacggctccctggaccgtgagcagctgctggaggcggatgaggaggtgcagctgcaggtcacggccaccgagacacacctcaacatctacgggcaggaggccaaggtgagcatctgggtgacagtgagagtgatggacgtcaatgaccacaaacctgagttttacaactgcagcctcccagcctgcaccttcacccccgaagaggcccaagtgaacttcactggctacgtggacgagcatgcctccccccgcatccccatcgatgacctcaccatggtggtctacgacccggacaagggcagcaatggcaccttcctgttgtcgctggggggccccgatgcagaagccttcagcgtctccccggagcgggcagcgggctcagcctccgttcaggtgctggtgagagtatccgcgctggtggactacgagaggcagacggcgatggcggtgcaggttgtggccacagactccgtcagccagaacttctccgtcgccatggtgaccatccaccttagagacattaatgaccacaggcccacgtttccccagagcttgtacgtcctcacggtgccagagcacagcgccaccggctctgtggtcaccgacagcatccacgccacggacccagacacgggcgcgtggggccaaattacctacagcctgctcccaggaaatggggcagacctcttccaagtggatcccgtctcagggacggtgacggtgaggaacggtgagctgctggaccgggagagccaggccgtgtactacctgacgctgcaggccacagatggcgggaacctgtcctcctccaccacactgcagatccacctgctggacatcaacgacaatgcacccgtggttagcggctcctacaacatcttcgtccaggaggaggagggcaatgtctccgtgaccatccaggcccacgacaatgatgagccgggcaccaacaacagccgtctgctcttcaacctgctgcctggcccctacagccacaacttctccttggaccctgacacagggctcctcagaaacctggggcccctggacagagaggccatcgaccccgccctggagggccgcattgtgctgacagtgcttgtgtctgactgcggcgagcctgtcctcggcaccaaagtcaatgtcaccatcactgtggaggacatcaatgataacctgcccatcttcaatcagtccagctacaactttacggtgaaggaggaggatccaggagtgctagtgggcgtggtgaaggcctgggacgcggaccagacggaagccaacaaccgcatcagcttcagcctgtcggggagtggtgccaactacttcatgatccgaggcttggtgctgggggctgggtgggctgagggctacctccggctgcccccggacgtgagcctggattacgagacacagcccgtcttcaacttgacagtgagtgctgagaacccagacccccaggggggtgagaccatagtagacgtctgcgtgaatgtgaaagacgtgaacgacaatccccccaccctggatgtagcctcactccggggcatccgtgtggctgagaatggctcacagcacggccaggtggctgtggtggttgcctcggatgtggacaccagtgcccagctggagatacagcttgtgaacattctctgcaccaaggccggggtcgatgtgggcagcctatgctggggctggttctcagtggcggccaacggctctgtgtacatcaaccagagcaaagccatcgactacgaggcctgtgacctggtcacgctggttgtgcgggcctgtgacctagccacggaccccggcttccaggcctacagcaacaatggaagcctcctcattaccattgaggacgtgaatgacaatgcaccctattttctgcctgagaataagacttttgtgatcatccctgaactcgtgctgcccaaccgggaggtggcttctgtccgggccagagacgatgattcagggaacaatggcgtcatcctgttctccatcctccgagtagacttcatctctaaggacggggccaccatccctttccagggtgtcttctcgatcttcacctcctccgaggccgacgtgttcgctgggagcattcagccggtgaccagcctcgactccactctccaaggcacctaccaagtgacagtccaggccagggacagaccttccttgggtcctttcctggaagccaccaccaccctgaatctcttcaccgtggaccagagttaccgctcgcggctgcagttctccacaccgaaggaggaggtgggcgccaacagacaggcgattaatgcggctcttacccaggcaaccaggactacagtatacattgtggacattcaggacatagattctgcagctcgggcccgacctcactcctacctcgatgcctactttgtcttccccaatgggtcagccctgacccttgatgagctgagtgtgatgatccggaatgatcaggactcgctgacgcagctgctgcagctggggctggtggtgctgggctcccaggagagccaggagtcagacctgtcgaaacagctcatcagtgtcatcataggattgggagtggctttgctgctggtccttgtgatcatgaccatggccttcgtgtgtgtgcggaagagctacaaccggaagcttcaagctatgaaggctgccaaggaggccaggaagacagcagcaggggtgatgccctcagcccctgccatcccagggactaacatgtacaacactgagcgagccaaccccatgctgaacctccccaacaaagacctgggcttggagtacctctctccctccaatgacctggactctgtcagcgtcaactccctggacgacaactctgtggatgtggacaagaacagtcaggaaatcaaggagcacaggccaccacacacaccaccagagccagatccagagcccctgagcgtggtcctgttaggacggcaggcaggcgcaagtggacagctggaggggccatcctacaccaacgctggcctggacaccacggacctgtgacaggggcccccactcttctggaccccttgaagaggccctaccacaccctaactgcacctgtctccctggagatgaaaatatatgacgctgccctgcaaaaaaaaaaaaaaaaaaaaa

SEQ ID NO: 57052 - DNA, 8974 bp, Homo Sapiens; identical to SEQ ID NO: 24962

SEQ ID NO: 57053 - DNA, 4250 bp, Homo Sapiens; identical to SEQ ID NO: 27137

SEQ ID NO: 57054 - DNA, 5190 bp, Homo Sapiens
agaatgtcttctgctcagtgcccggcactagtgtgtgtcatgtcccggctgcgtttctggggcccatggcccctccttatgtggcaactattgtggctactagttaaggaggctcagcctctggagtgggtcaaggacccgctccagctcacctctaatcccctggggccgcctgactcctggtcttcccactcctcccatttcccacgggaatctccccatgcgcctactctcccagcagacccgtgggactttgatcacctggggccctctgcttcctcagagatgccagccccaccccaggaatcgactgaaaatttggttccattcctggacacctgggattcagctggagagcagcccctggagccagagcagttcttggcttcacagcaggatttaaaggacaagctgagtccacaggaaagactccctgtttcgcccaagaagctgaagaaagatccagctcagcgttggagccttgctgagattattggaattacacgccaattatccacacctcagagtcagaaacagactttgcagaatgaatattccagtacagatacaccgtatcccggtagcctgcctccagaactccgggtgaagtcagatgagcctccagggccctctgagcaagttggaccttctcaattccatctagagcccgaaactcaaaatccagagacccttgaagacatccagtcctcttcactccagcaagaagccccagcacagcttccacagctccttgaggaagaaccttcttcaatgcagcaggaggccccagctctgcctccagagtcctctatggagagtctaactctaccgaatcatgaggtgtcagttcaacctccaggtgaggatcaagcttattatcacttgcccaacattacagttaaacctgcagatgtggaggttaccataacttcagagcctaccaatgagacagaatcttcccaagcccagcaggagaccccaattcagtttccagaggaggtggaaccttctgcaacccaacaggaggccccaattgagcctccagtttctcctatggagcatgaactttccatcagtgagcagcagcagccagttcagccttctgagtcttctagggaggtcgaatcttctctgacccagcaggagaccccaggtcagcctccagaacatcatgaagtcacagtttcacctccaggtcaccatcaaactcatcatttagattcacccagtgtctctgtgaagcctccagacgtgcagctcaccatagcagcagagcctagtgcagaggtgggaacttctctagtccaccaggaggctacagctcggctctcagggtcaggtaatgatgtagaacctcccgccatccagcacgggggcccacctctgcttccagagtcatcagaagaagctggacctttagcagttcaacaggagacttcatttcaatctccggaacctattaataatgagaacccctctccaacccagcaggaggctgcagctgagcatccacagaccgctgaggagggtgagtcttccctaacccatcaggaggccccagctcagactccagagttccctaatgtagttgtagctcaacctccagagcattcacacctgactcaagccacagttcaacctttggatctggggtttaccatcactccagaatccatgacagaggttgaactttctccaaccatgaaggagaccccaactcagcctcctaagaaagttgtaccccaacttcgagtatatcaaggggtaacaaatccaacaccaggtcaggatcaagctcagcatccagtgtcacccagcgttacagttcaacttttggacctgggacttaccatcactccagaacccactacggaggttggacattctacagccccgaagaggactatagtttctccaaagcatcctgaggtgacacttcctcatccagaccaggttcagactcagcattcacacctgactcgagccacagttcaacctttggacctggggtttaccatcactccaaaatccatgacagaggttgaaccttctacagccctgatgactacagctcctcctccaggacaccctgaggtgacacttccaccttcagacaagggtcaggctcagcattcacacctgactcaagccaccgttcaacctctggacctggagcttaccataactacaaaacctactacagaggttaaaccatctccaaccacagaggagacctcaactcagcctccagacctgggacttgccatcattccagaacccactacagagactggacattctacagccctggagaagactacagctcctcatccagaccgggttcagactctgcatcaaagcctgactgaagtcacaggtccacctactgaactagaacctgctcaggattcactggtgcagtctgaaagttacacccaaaataaggctttaactgcaccagaggaacacaaggcctccacaagcaccaacatatgtgagctctgtacctgcggagatgagatgttgtcatgtattgatctcaacccagagcagaggctccgccaagtgcctgtgccagagcccaacacccacaatggcaccttcaccatcttaaatttccaaggaaactatatttcttacattgatggaaatgtatggaaagcatacagttggactgagaaactaattctcagagaaaataacttgactgaattacacaaggattcatttgaaggcctgctatccctccagtatttagatttatcctgcaataaaatacagtctattgaaagacatacatttgaaccactaccatttttgaagtttataaatcttagttgcaatgtaattacagaactcagctttggaacatttcaggcctggcacggaatgcagtttttacataagttaattctcaatcacaatcctctgacaactgttgaagatccgtatctctttaaattgccagcattaaaatatctagacatgggaacaacgctagtcccacttacaacacttaagaacattctcatgatgactgttgaactggaaaaactgatcttacctagccatatggcctgctgcctctgccaatttaaaaacagcattgaggctgtctgcaagacagtcaagctgcattgcaacagtgcatgtctgacaaacaccacacattgtcctgaagaagcatcggtagggaatccagaaggagcgttcatgaaggtgttacaagcccggaagaactacacaagcactgagctgattgttgagccagaggagccctcagacagcagtggcatcaacttgtcaggctttgggagtgagcagctagacaccaatgacgagagtgattttatcagtacactaagttacatcttgccttatttctcagcggtaaacctagatgtgaaatcactgttactaccgttcattaaactgccaaccacaggaaacagcctggcaaagattcaaactgtaggccaaaaccggcagagagtgaagagagtcctcatgggcccaaggagcatccagaaaaggcacttcaaagaggtaggaaggcagagcatcaggagggaacagggtgcccaggcatctgtggagaacgctgccgaagaaaaaaggctcacgagtccagccccaagggaggtggaacagccccacacacagcaggggcctgagaagttagcgggaaacgccgtctacaccaagccttcgttcacccaagagcataaggcagcagtctctgtgctgaaacccttctccaagggcgcgccttctacctccagccctgcaaaagccctaccacaggtgagagacagatcgaaagacttaacccacgctatttccattttagaaagtgcaaaggctagagttacaaatacgaagacgtctaaaccaatcgtacatgccagaaaaaaataccgctttcacaaaactcgctcccacgtgacccacagaacaaccaaagtcaaaaagagtccaaaggtcagaaagaaaagttatctgagtagactgatgctcgcaaacaggcttccattctctgcagcgaagagcctcataaattccccttcacaaggggctttttcatccttaggagacctgagtcctcaagaaaacccttttctggaagtatctgctctttcagaacattttatagggaagaataatacaaaacacacaactgcaagaaatgcctttgaagaaaatgattttatggaaaacactaacatgccagaaggaaccatctctgaaaacacaaactacaatcatcctcctgaggcagattccgctgggactgcattcaacttagggccaactgttaaacaaactgagacaaaatgggaatacaacaacgtgggcactgacctgtcccccgagcccaaaagcttcaattacccattgctctcgtccccaggtgatcagtttgaaattcagctaacccagcagctacagtcccttatccccaacaacaatgtgagaaggctcattgctcatgttatccggaccttgaagatggactgctctggggcccatgtgcaagtgacctgtgccaagctcatctccaggacaggccacctgatgaagcttctcagtgggcagcaggaagtaaaggcatccaagatagaatgggatacggaccaatggaagattgagaactacattaatgagagcacagaagcccagagtgaacagaaagagaagtcgcttgagctcaaaaaagaagttccaggatatggctatactgacaaactcatcttggcattaattgttactggaatactaacgattttgattatacttttctgcctcattgtgatatgttgtcaccgaaggtcattacaagaagatgaagaaggattctcaaggggcattttcagatttctgccatggaggggatgctcttcgcgaagggagagtcaggatggactttcctcatttggacagccgctctggtttaaagatctgtacaaacctctcagtgccacaagaataaataatcatgcatggaagctgcacaagaagtcatctaatgaggacaagatcctcaacagggaccctggggacagcgaagccccaacggagggggaggagagtgaagccctgccataggaggagaacacagcccacctcaggcctcctgcaaaaatacatagaataaacaacaacagttactaaacgaaaaaaaaaaaaaaa

SEQ ID NO: 57055 - DNA, 8459 bp, Homo Sapiens
tctcttgcaagtgggcaaacttgacgttttcgctatgggcaaacgcgggagccggagccagagccagctactcaacaccctaactaaaaagcagaagaaacatcttcgagatttcggcgaggagcatcccttctatgacagggtttccagaaaggaagcaaagccacagatttgtcaactgtcagagagttcagattcttcagattctgaaagcgactcagagagtgaaccagaacaagtttctggctaccacagactacttgctacattaaagaatgtttctgaggaagaagaggaagatgaggaggaggaagaggaagaagacagtattgtagatgatgcagaaatgaacgatgaagatggtgatagcgatgtcagtgtggaagaagagatggctgcagagtctactgaaagtccagagaatgtagctttatctgctgaccctgagggaaaagaagatggggaagagccaccgggcacatcacaaacatcccctgaagagttcacagatgcaaaacacgagtcactgttcagcctggaaaccaattttctggaagaggaaagtggagacaactcttctttgaaagcctctcaagatccatttcttcaacatgtgaacaaagaactgaaagaaaaagcaattcaggctgttgccacaaatcccaaaactacccacgagcttaaatggcctattctgggccagcttttcttttcctctaagtttcagaagttggaaacatttaaacccccaaaggatattgacttaaagtcacttcatctccagaagcctctggaatccacctggactaagaccaacagccagttcctatctggtccccaaaaatcaagcagcccattcacccccctccagaaagaactcttcttaattatgaattcttaccgggacctgttctacccggaaaggactgctctgaagaacggggaagagatccgccatgtgtattgcctgcatgtgataaatcacatcctcaaagccaatgcccaggtgcttggcaacaatagcagacgccgaagccagaagtttggagtgggtgatgatgatgacttcagagaccaagggttaacaaggcccaaggtactgatagtggtgccattccgggaagctgctttgcgggtggtgcagctcttcatcagcctcctcgagggtgacagcaagaagaaaatcattgtgagcaacaaaaagaggtttcagggagaatatggatcagatcccgaggagagaccacccaacttgaagaggcctgaggattatgaagccgtatttgtgggcaatattgatgaccacttcaggattggagtggcaatacttcagagaagcatccgactctatgccccgttttactcctcggatatcctcattgcttcccccctgggcttgaggaccatcattggtggagaaggagagaagaagagagattttgactttctgtcttctatcgagcttctcatcattgatcaagctgacatttacctgatgcagaactgggagcatgtcctgcatttgatgaatcacatgaacctactacccctggactcacatggggtagacttttctcgagtgcggatgtggagcctcaataattggtccaagtactatcgccagacactgctatttggggcccttcaggatgcccagatcaactcagtgttcaacaagtactgtgtcaacatgcaaggccaggtggccgtgaggaatgtcccaatgacaggctctatcagtcatgtcctggtgcagctcccacatgtcttccagaggatggaagctgaaaacctagcttcagtgattgatgccaggtttaacttttttgtgaacaagattttgccacagtatcgtgatgcagtcatgtctcacacgctcatctatatcccctcctactttgactttgtgcgtcttcgaaattacttcaagaaggaggaattgaattttacccacatctgcgagtacacgcagaagtctggtgtctccagggccagacacttcttccttcaaggagagaaacagtttctacttttcacagagcgcttccatttctacaaaaggtatacaataaaaggcatcaggaacctgattttctatgaactgccgacatatccacacttttacagtgaaatctgtaatatgctgagagccaccaacagaggagaagaggccacgtggacctgcactgttctctactccaaatatgatgcccagaggttagctgccgtggttggtgtggagcgggcggcacagatgctacagtccaacaagaatgtccacctcttcattactggagaaaaatgaaattttgttgggcaggaagtggtatttggcatgatacataatgtttgattctatgccatttggacccaattctgattacttacagaagaaggactgatacaaagaaagtgcatgaggcaatgtcagtattatctgacatctttcttttcaggtcatgtgtccctgaaaagttaaatgtaaaccagattttggtaaatcccatctttcagaagtgaagagggggctagaaggactctgagaagttggtagaagaaaactcccacttgtgaatatttttgtgagacataaattcttttattacgatttacctctaatttattacacttagtaaattcttccagatttttctatttgtttgacacttccttaaagtaaggaatacacattgcttgcgagaactggttatgagacattggaatacttcttgctgctacatgtcatcttaattttggatggcatgggttttgtaaaacttattctgccccagccaaacttttttgaaaccttaaatagtctaccttaattcagcctagaagagtacattgatttactgatcttttttcatattcataatactaaatgttttagttttgttcaaatatatgcttaaaatcacgttatttaaaaaacacatcagctctgtctcaagaagtaattttgttgaaactccatgttaaaatatccatcttcaacagtagtgtcttcataataactagtcattttttcagtcataaacagatgcaaataaaaaggaaattacacttttaaaaacatttttattttgaaacattctcaaacagaaaaattccaagtacagaacctgaaccatttgagagtgagttgccaacccagtgggcctatcacctttaaatactttagtatatatttcctgtaaacaattaagggtattgtttgtgattaggaatgccccaccaataaggataatgtgaatatttcaaaatccaaaaaaattcgaaacacgtctggtcccaagcatttcagataagagatattcaactcatcctagtatggactcgtagtttcttcttttattcaatgggttacggtttgttacatcattatttctttagatgcgtaactggtctcaaatatggccgctgggaccaccttcaggttagcccctgtgtacttttgacatgtcccccatctacttgggcactgctgtattttttgacaatgagacattccaggtttctctactccagccctgcttgcttttagtaggaaattattataaaaggttagattggagtgcttactattgtggtgccactcatcccaggctcagtggtcagaacttgggaattgtgtacatgtatgcacacacatatgtacacacgttgtctaaacttgcttcacattaatatctaaatttactttcatatccatatattgaaaaccatgaattcacaccagtacctccaattctagtccaacaacacaggattgcttctcattttctttccatattgataactcctttctcagacagtggctcccattatcctcaatgtaataacccatgattggtacagatttttttttatccttgggcacgcttaaaattacttagcaaaaacaaaaagtaaaatcagttttgaagtaatatttctgctaaatatttagacatttttacttctttttcttcagcatggtaagtaaaaccatttattccatatttagatggttttctaaatttcagaaaatttagttagataaaagccgaccgaacccatgctacaaagaactttttgtatctataggcatgccctgtggttactggcgtaattgtgctgctgtttatcatagatcctgtatattatgagaataagaaatgagtttatttacctcattcagaaatgtgaggcgaagggactgtaattacctggatcttttttttttttttgagatggagtctcgctctgttgcccaggctggagtacactggcatgatcttggcttactgcaatctgtgcctcccgagttcaagcgattctcgtgcttccgcctcccaagtagctgggactacaggcgcatgccaccatgcacagctaattttttatatttttagtagagatggggttttgccatgttggccaggctggtctcaaactcttgacctcaagtgatctgcccacctcagcctcccaaagtgctggggttacaggcctgagccgccacgcctggccaattacctacatctttttctactgccatattcttttgcctgtgaattgtagttcatctcgtggtttccattattactattcacacgactcccaaatctccagcttctctggctctccactcacatgtgagtctggatttcaaatccatgatgtagccccagaaataaccattttattaagcacccctagtgattttcatgctggcatagagccaaacccagccaactgcttcttgcctgcagagaacactgaggatttcaagtgtgaacaaagtagtgttgctttgttcctggctcagcacctgaaaagaaggtaagcctctgcagttagccctggctccttagtgcattgcagagtggagtctctgcaatggttttattaaaaggatgccttgaagatctggtctctctcaacacacaataagcgagaagagaggctactgaaatacggatgcgtgagctggaattacacactaccttgatgttaacaaggctcatttgcagcaagcaagtgcctatatagggtctgaaatatagacaaaggatggtcccaatcctggaaacagtggaattaaaaggtatggaaaggaacttacccagaaagtaacacttttaaatgttttttcttttcccatagttaaaacaaccagctcagcacttttctttttgagagaaaaagctttgaatcgtggatgcttctcacagctggctgcaccatgagcagtgttcaaaaaacaagaacaagctaatcatagagaaccagcagcagctaaacagccctctgcttgcttccaaagggcttataattgagcacagatggtcctagtggagatggggaatgtgtccctgctgactcctcataccccagaggaccaaggggggctcatgaaggctctcagccctgattgtgccctcgtgagggcaaggagctacgctgctgaaggaggaaagggaaaggcaggtggggccagaccctattggccatctgaccagccttcccaagcccacgtgagcagatctagggtctcaagattacagaaggcctggggtgagggagcaagagttggaagttctttatagttgtctgaagagcctcattgtccaactgcaggggcctgaggtgcccaaagcttcgtggaaaagtaatgtcagtggaatgctcagaagtggctcttttcagggcacggcttctgaggagcgtggggccaccacagctagccctccctccgtctagccatcctctccttccagtccctttcccatcttttctctcaaaggagcatggtagtgatcttcattaccaaatttctactccacacttattttaaaaagcttttctgaaagcctggctacatagaattctaaacagatttcagtcaacttttaattagagtcaatgaatggggagtaaatacacagataatccaaaattgatgtaagcattggaaggtgaaagagggaacgcttctttccctctgggcttggtcatttcctcccaagcaaaccccgcgacgttcagccgtcttcctcctatgccacgtgctctcaccagaactgcagcaaaactgcattttatgtcctgtgtctaaagctaaacacatgttcctgtctacttttgctttgttcctgtttcccttctgtgaggaccttcccctcctcagatgtggggagttgccgcctccacttgcattacatgtatttcagagtaggtcctaggctccccttacacctctggtcacgttgccattattcctatggtagataaaggggatgagaaagaacagagctccaggcctttttcaaacaaactggttttctcagtatagccctatgctcaaaaggagtgaggacaggtatgtgactgccataaggagctgtttgctttgcacagagaaatctaatctttctcctgctgggcagctcagtacagatgtcccctcactgctggaagaaacacctgcccttgcttgttctcctgatggcccctcacagtcaggtgtgggatggcacatttctaggtgctcctcgccgagctgtcatgggcttcagtcttgggcctctgcagctggctgtgaccaggtggaaactgtagccttggctgacccagagaaggaaaggaggcagtctgccgcttggctgatttaggagttgtgctgaattcctgcccatctgttctcccagctgagccaaggccaaagctgtctaccttttgccaacctaaggaatgacacagagcatggagcaccatcactgaaacatctgccccagtgccctgccaccttcgtcctcactgacctctgcagcctctctcatctgccagttttgattccgcaaggagaggtggccctgggctcacagctggtgtttgtccacagatgttcatgggtttctttgtgttctctcattttttcaaagctgggtgttggcaccaacatcaccactgacattctgtggctctaaacaagtcctcacgaccacttctcagttttctcatctttatgaagtatggagtaatccccactagccttatagagggactgtgtgagaagggaagagactgctattgtttgccctatatccacctacttccctagttccagaacgctggactttaatgagataacaaagtacctagtaaaaacactgcatcattttccatcccccaccccttgcagtaaaatgtggcccatgagacagaagcactaactactgagcaggacttctaggggagttctttaaaactcagaggagcaccacttttaccttctgctcttccctttttcctgcctggaacgcagaagtgatggctgaagctcctgaggctataagctctgtacgtaggagagtggtgaagaaaggagcttggttctgcaaggatgttgtagagctgccataccagtcctgcatggtattcctgtgcactactgttacgtgaacacacaaacacctaatttgtttaagccattaggccaggcctctattagccattcctgactgatacagaagacaaaaatggcatcacagactcctgaactccaaagacactgcctattctttcgtctgttcttggcaagcaccaacattgagactgtacttcagggttgatgctggccatttggtggcgtgaggagtgggcactcacatgtctctgctagcagttctgacgtgtccattccacactggatccatagaatgagggaacacaagtgtcttctcataagatttatagaaacagtgatcgttgcagaaaaataattagcaagagaacagacttcagctctctgaaggctgatgaccacctgtttctcatctcttctagtgtatgtcaaagctaaattaggtcaaataggaaataagtcagaatccccaattcgatagaaacttacaggtcttgtgatctaatctgccacttgatccgtgaattacctataggtcatccctaagaggtggcctccagcttctgcttgaattccttcaaggatggggtgctcattgtggcttttctaatcatctctgattgttagaaacactgtgaaacttttatccatcagtcctgtttctgaagctgtacggtacaaatttttttttccccacttaaggctcaactattggaatacatctaccatgtctcctacgaaacttgcttctccaggccaatcatccttacttccttaaacttttttttttcctgaaaagttattcttttaatcttattaaaaaagcaaaccatgcccattccacaaatacaagtgaaatagtgaaaaacaaaaatcaaactacatctatttggtgatcattattaatgtcttatgtttcctcccagattgttttctgcatgaataataaccaacaatgtgtgtgtatgtatatatatgcttttgcattaaaaggtggttttgaaggtaaaaaaaaaaaaaaaaaaaaagaaaaaaaaaaaaaaaaaaa

SEQ ID NO: 57056 - DNA, 2565 bp, Homo Sapiens; identical to SEQ ID NO: 23452

SEQ ID NO: 57057 - DNA, 1924 bp, Homo Sapiens; identical to SEQ ID NO: 30380

SEQ ID NO: 57058 - DNA, 761 bp, Homo Sapiens
ggcggcaggaccagcatgcaccaccgaaacgactcccagaggctggggaaagctggctgcccgccagagccgtcgttgcaaatggcaaatactaatttcctctccaccttatcccctgaacactgcagacctttggcgggggaatgcatgaacaagctcaaatgcggcgctgctgaagcagagataatgaatctccccgagcgcgtggggactttttccgctatcccggctttagggggcatctcattacctccaggggtcatcgtcatgacagcccttcactcccccgcagcagcctcagcagccgtcacagacagtgcgtttcaaattgccaatctggcagactgcccgcagaatcattcctcctcctcctcgtcctcctcagggggagctggcggagccaacccagccaagaagaagaggaaaaggtgtggggtctgcgtgccctgcaagaggctcatcaactgtggcgtctgcagcagttgcaggaaccgcaaaacgggacaccagatctgcaaatttagaaaatgtgaagagctaaagaaaaaacctggcacttcactagagagaacacctgttcccagcgctgaagcattccgatggttcttttaaagcagtagtatatcttattttcaaggcatttggaaatgaagggcaaactaatgtcttgttttaagaaactgcttagtccaccactgaagaaaatatccagaaattattttcattttatgtatagggatttcttcaaaaaaaaaaaaaaa

SEQ ID NO: 57059 - DNA, 2015 bp, Homo Sapiens
acaaataataaggaacaaggtgtggttattgattctctaaaattaagtgaggagatgaagcccaatctagatggtgttgatttattcaacaatggtggttctggaaacggtgaaacgaaaactgggctgagactgaaagcaataaatctgcctttggaaaatgaagtaactgaaatttcagctttgcaggtgcatttggatgaattccaaaaaatcttatggaaggaaagagaaatgcgcacagctttggaaaaagaaatagagagactggagtcggctttgtctctgtggaagtggaagtatgaagaactgaaagaatcaaagccaaaaaatgtgaaagagtttgacattcttcttggtcaacataatgatgaaatgcaagaactgtcaggcaatataaaggaagaatccaaatctcaaaacagcaaagacagagtgatttgtgagttaagagcagagctagagagattgcaagctgaaaatacctcggagtgggacaagagggaaatacttgaaagagaaaagcagggactggagagagaaaatagaaggctgaagatccaggtgaaagaaatggaagagcttttggataagaaaaatagattaagtgcaaactctcaaagtcctgatttcaagatgtcacaaattgatctgcaagaaaaaaaccaggaattactgaaccttcaacatgcctactataaactaaacagacaataccaggcaaatattgcagaactgactcatgcaaacaaccgagtggatcaaaatgaagcagaagtaaagaaactaagattacgagtggaagaactaaagcagggactcaaccaaaaagaagatgagcttgatgattccctgaatcagatccgtaagctccagaggtctctggatgaagagaaagaaagaaatgaaaacttagagactgaactcaggcacttgcaaaactggtaattttttcacaaaatatgctgaattaaagattagggccttaaagacatttccatatccttttcttaaatatcagtaaaattgtttttattaactagaaatattaatgaaaaaaacgtagacaatacacaaattaatgggcttcttcacttcttctaatttttgcctaacagatactgcatattctcaaaaagacaatttaaatgtcatttaaaaacaactttaattctaagatgtgtaaatattttgaaagtcaaaaagggctttcagaatactttttacataaaatctgaaagagttataatatcggtaagaaaaagtaagttgaaaaccatacaagacgctgggtcattaataagaaaaccattgactttaagtataaagtactggtttgtttaaataattggtaaacttttatgtacgtgttgtctatgtggtggggatggcaggttgtattaacaaaaatgaatcattctagaggtgtaacaatacatttcttatataattttataagtcatttctaatctttgtataaaacagaagtgagcaagatgaatcagaaaaaaggtgttttgtattttaaaggtaacagataaccaggtgattgaatctaagacaggctgtaagcatcgctgagaaactaaaaggacttttgacttttatctggatagacatttctacagtaaaatcatggaaaggcatcagcattgcaaagtagcatctaggtagaaatcaggccaaaattaagctgtggtttccctctgagtagtgggaatagagaaaattaggaaattgtggttatgtgaatatttctttaaaacttttatgtacattatagtttattgcttcatatttaagtttagtttttaaggtaaaatgttattttgaacaaaaagacacttataattttccatacctattttcaactgaaggcaacttgtaagatttaactcagtcaataacatactggttttactcatctccccctccattgattagccaaaaaaaaatgaaatcttactaattcattattgaataaagaccacttttatcagagtcaaaaaaaaaaa

SEQ ID NO: 57060 - DNA, 1894 bp, Homo Sapiens
actctcctcccccgagcggcagcggcagcggcggcggcggcggctgctgcgggcgctgaatgagagacggtgactgttcgggtcgacgagtgctactctaggcggcggcggccgtggcggtgaagcgtggggccggcatcgtctttccgtcctctgagacgacggccgcggctgcacaggaataatgtatttgtggccttggacatgaggcagtcagtcctctgttgctgttaacataaggtcagggactgatgaggaaagcatggacctaatgaacgggcaggcaagcagtgtcaatattgcagctactgcttctgagaaaagtagcagctctgaatccttaagtgacaaaggctctgaattgaagaaaagctttgatgctgtggtattcgatgttcttaaggttacaccagaagaatatgcgggtcagataacattaatggatgttccagtatttaaagctattcaaccagatgagctttcaagttgtggatggaataaaaaagaaaaatatagttctgcaccaaatgcagttgccttcacaagaagattcaatcatgtaagcttttgggttgttagagagattcttcatgctcaaacattaaaaattagagcagaagttttgagccactatattaaaactgctaagaaactgtatgagctgaataaccttcatgcacttatggcagtggtttctggcctacagagtgccccaattttcaggttgactaaaacatgggcgttattaagtcgaaaagacaaaactacctttgaaaaattagaatatgtaatgagtaaagaagataactacaaaagactcagagactatataagtagcttaaagatgacaccttgcattccctatttaggtatctatttgtcagatttaacatacatcgattcagcatacccatcaactggcagcattctagaaaatgagcaaagatcaaatttaatgaataatatccttcgaataatttctgatttacagcagtcttgtgaatatgatattcccatgttgcctcatgtccaaaaatatctcaactctgttcagtatatagaagaactacaaaaatttgtggaagacgataattacaagtaggttggatcttcaaaagtggtttgtataactttgtcctgtcctccacctttctatccctatgtatttaaacatctaaatcctacatggtatcatacaaaggactaatccagtggtttacagcagtaaaggtactaacatgtattacttcttaatcacttgttatgattgagccaatatacaaatacctcatctgttctttttaatattttatctctgtttgtagagagctaacgtttgatagttctaatttaaatttcttcctttcccccatattcaatcattgaatccttatagaatttgtcttttaatagacagaaaaattaatgaaactttttaaaatagaaaaattactcttctttaatgctaagtattgacacatcgttgtttgtttttcattgtttttgcggattgagagacttggtccatcttgtctcaggagaagaaacctttctccaatgtagcagaattatcctcttccctgtattatagcaagttctttattaaagatttttgaggccgggcacagtgactcacgcctgtaaccccagcactttgggaggccgaggcgggtggatcacttgaggtcaggagctcaagaccagcctgaccaatatagtgaaacactgtctgtactaaaaatacagaattagccgggcatggtgcatgcctgtaatcccagctgcttgggaggctgaggcaggagaatcacttgaacacaggaggcagaggttgcagtgagccgagagtgcaccattgcactccagcctgggcaaaaagagcaaaactccgtct

SEQ ID NO: 57061 - DNA, 1199 bp, Homo Sapiens
ccgggcaggtattcaagtgattctcccatctcggtctcctgagtagctgggactacaggtgcatgccactaagccccatggcccttggggcctgtggcctcctgctgctcctggctgtgcccggtgtgtccctcaggactttgcagccagggtgtggccggccgcaggtttcggatgcaggcggccggatcgtggggggtcacgctgccccggccggcgcatggccatggcaggccagcctccgcctgcggaggatgcacgtgtgcggcgggtcactgctcagcccccagtgggtgctcacagctgcccactgcttctccgggtccctgaactcatccgactaccaggtgcacctgggggaactggagatcactttgtctccccacttctccaccgtgaggcagatcatcctgcactccagcccctcaggacagccggggaccagcggggacatcgccctggtggagctcagtgtccccgtgaccctctccagccggatcctgcccgtctgcctcccggaggcctcagatgacttctgccctgggatccggtgctgggtgaccggctggggctatacgcgggagggagagcctctgccacccccgtacagcctgcgggaggtgaaagtctccgtggtggacacagagacctgccgccgggactatcccggccccgggggcagcatccttcagcccgacatgctgtgtgcccggggccccggggatgcctgccaggacgactccggggggcctctggtctgccaggtgaacggtgcctgggtgcaggctggcattgtgagctggggtgagggctgcggccgccccaacaggccgggagtctacactcgtgtccctgcctacgtgaactggatccgccgccacatcacagcatcagggggctcagagtctgggtaccccaggctccccctcctggctggcttattcctccccggcctcttccttctgctagtctcctgtgtcctgctggccaagtgcctgctgcacccatctgcggatggtactcccttccccgcccctgactgatggcaggaatccaagtgcatttcttaaataagttactatttattccgctccgccccctccctctcccttgagaagctgagtcttctgcatcagattattgcaacatttaacctgaatttaaaagcacacgaaacaaaaaaaaaaaaaaaaaaaaaa

SEQ ID NO: 57062 - DNA, 1016 bp, Homo Sapiens
agcgacctcagaggagtaaccgggccttaactttttgcgctcgttttgctataatttttctctatccacctccatcccacccccacaacactctttactgggggggtcttttgtgttccggatctccccctccatggctcccttagccgaagtcgggggctttctgggcggcctggagggcttgggccagcaggtgggttcgcatttcctgttgcctcctgccggggagcggccgccgctgctgggcgagcgcaggagcgcggcggagcggagcgcccgcggcgggccgggggctgcgcagctggcgcacctgcacggcatcctgcgccgccggcagctctattgccgcaccggcttccacctgcagatcctgcccgacggcagcgtgcagggcacccggcaggaccacagcctcttcggtatcttggaattcatcagtgtggcagtgggactggtcagtattagaggtgtggacagtggtctctatcttggaatgaatgacaaaggagaactctatggatcagagaaacttacttccgaatgcatctttagggagcagtttgaagagaactggtataacacctattcatctaacatatataaacatggagacactggccgcaggtattttgtggcacttaacaaagacggaactccaagagatggcgccaggtccaagaggcatcagaaatttacacatttcttacctagaccagtggatccagaaagagttccagaattgtacaaggacctactgatgtacacttgaagtgcgatagtgacattatggaagagtcaaaccacaaccattctttcttgtcatagttcccatcataaaataatgacccaagcagacgttcaaaatattaaagtctattttctactgagagactggatttggaaagaatattgagaaaaaaaaccaaaaaaaatcttgactagaaatagatcatgatcactctttatatgtggattaagttcccttagatacattggattagtccttaccagtagac

SEQ ID NO: 57063 - DNA, 2092 bp, Homo Sapiens
ctcggagctttttctccagttaactgtcggagtagcgggggctccggcgccgggcgacatgccggtgcgcttcaaggggctgagtgaataccagaggaacttcctgtggaaaaagtcttatttgtccgagtcttgtaattcctccgtggggcgaaagtacccatgggctggacttagatcagatcaattaggcatcacgaaagagccaagttttatttcaaaaagaagagtcccttaccatgacccacagatttcaaaatctctggagtggaatggagctatctcagagagcaatgtggttgcatcaccagaaccagaagccccggaaacaccaaaatcacaagaagcagaacaaaaggatgttactcaagaaagagttcactcactagaagcttccagggttcccaaaagaaccagatctcactctgcagactccagagctgaaggggcttcagatgtggaaaataatgagggtgtaacaaaccatacaccagttaatgaaaatgtggaactggaacattctaccaaggttctttcagaaaatgtagataatggggtaggcatattcactgcatttcttttcaaaagcatagaattcttcattggtttcattgtcatttctgtaatattacattttgtgtttcagaattttccattgttgttttcttgtctaatgtctataagaatagttgataacaggctgttgactttagttattgtgaattagttctattctgactactcgctattttgtagtagttgtactatgataatctgtttattggatggacctcctgcgtctggattttattcatcatatattagcacctgagtcctaagggagagatcaagttgagacagagaagggaagtaggcccttacttctggcagggtgctgagctgacttctacctagccccttttcagtttcttatcgtgtacaagaagacaaacagaaattcaattgatgaaatgcaaaaggaaggagagctctggctgtctctcagagatcttgcatttctgctctcttatgtcacagctggcctgcagcaggtccctgtgagcacataagcagaggctgcaggaacttgtgtggggatctcaatgctttccacatttctttctccattctgttccactgctcttctctggttcatgtccaccactgactgggaccctgaagaggcatttcagagtgttggagaagaatctgtagcttgttgaaaaagctgggggtgaaagggaacaaggaaggtgatgtgtgagtctggcaggcaggagaaggggtgttcatagaagcagtgtgcaggtgaggcaaagtgctgggactttttggtaatagatttaattatgaatgattagtaggaaaggactgagagtattatatttttcctgggatgcctaatagtcctttgatagaaaggaattttaaatagtttgacacttgaaaaaagatactatttataagttgaagaaagtttgctgtaccacaatgcgcatgtagttaacaattttgcactgtagatttaacattttgttaagaagatagatttcatgttatgcattttttaccacaatttttaaaaagtttgaatagaaatttttaatgtctttgagtggattttgttttttgaacagttggatagacttctgcgtaagaaagctggattgactgttgttccttcatataatgccttgagaaattctgaatatcaaaggcagtttgtttggaagacttctaaagaaactgctccagcttttgcagccaatcaggtagcttaatggatgtaatacatttctgagtaccattatcttatctagtaatgtagatttacatagaattaagagttgaaagaaattaagtacttaagtagcctggaggtaggttctagaaaaccaaaatgagagttttgctaaaatcatcctattacttatgatttatggtagtaatattatactgtcctaggcttctgatgatcattgttgccagatgcagcacatatactaaatatgagacagggtaatgaaaacttggggaactggtaagtttttgcatgctacaagatttttttacttattaaaaaattattaaa

SEQ ID NO: 57064 - DNA, 2199 bp, Homo Sapiens; identical to SEQ ID NO: 27858

SEQ ID NO: 57065 - DNA, 1854 bp, Homo Sapiens; identical to SEQ ID NO: 30759

SEQ ID NO: 57066 - DNA, 2965 bp, Homo Sapiens
ggtgggtcgacccacgcgtccggtctttgtgcagagtgaagctcttgttgctgaacaataaagcatatggtacaagcaataaaacacagggctgggaaatttaagaagattcctctgaaccaggaagaactgtgtcttcggtgatgctgacacatatgataaaatgatcatttattttggatcctaatgaataaagagtgcaaggactaagactacagttatttgaacaggtacatgtgacagcactgcagcgatgagtggaattttaaagaggaagtttgaagaagttgacggctcctcaccctgctcctctgtgagggaatcagatgatgaagtttccagcagtgaaagtgctgacagtggggacagtgtcaatccatccacttctagtcattttaccccttcctccattctcaaaagggagaaacgactgaggacaaagaatgtacattttagttgtgtcaccgtgtactacttcaccaggaggcaaggcttcacaagtgtgcccagtcaagggggaagcaccctggggatgtccagccgccataacagcgtgcgccagtacactcttggcgagtttgcaagggagcaggagaggctccaccgggagatgttgagagaacaccttagggaggaaaagctgaactccttaaaactaaagatgactaagaatggcacagtagaatcagaagaagccagcactcttacactggatgacatttctgatgatgacattgacctggacaacacagaggtagatgagtacttcttcctacaacctttgccaacaaaaaaacgaagagctctgctgcgtgcctctggagtgaaaaagattgacgtggaagaaaagcacgaactccgagccatccgcctctcacgagaggactgtggctgtgactgccgagtgttctgtgatccagacacgtgcacctgcagcctggctggcattaagtgccaggtggatcgtatgtctttcccatgcggctgcactaaagaaggatgtagtaacacagcaggtagaattgaatttaatcctatccgtgttcggactcactttttgcacacaataatgaaacttgaactggagaaaaaccgagagcagcaaatccccacgctgaatggctgccacagtgagataagtgctcacagtagttctatgggccctgtcgctcactccgtagaatattcaatcgcagacagttttgagattgaaactgagccccaggctgcagtgctgcacctgcagtcggctgaagaattagattgccaaggagaggaggaggaagaagaggaggatgggagcagcttttgcagcggagtcacagattctagcacgcaaagcttggcacctagtgagtcagacgaggaggaggaggaagaagaagaggaagaggaggaggaggatgacgatgatgacaaaggagatggcttcgtggaaggtttgggcacccatgccgaagttgtccctcttccttcagttctttgttattctgatggcaccgccgttcacgaaagccatgcaaagaatgcttctttttatgccaactcttcaactctgtattaccaaatagatagccacattccaggaactccaaatcagatctctgagaactattctgaaagagacactgtcaaaaatggtaccctttcgctggtgccttacaccatgaccccggagcaattcgttgactatgcccgacaagcagaagaggcctatggtgcctcccactacccagctgccaacccctctgtaatcgtttgctgctcctcttccgaaaatgatagcggtgtgccctgcaatagtttatatcctgaacacaggtccaatcaccctcaagtggaatttcactcatacttgaaaggcccctcccaagaagggtttgtctctgcattgaatggtgacagtcacatttcagagcatcctgctgaaaattctttgagccttgcagaaaagagcatattgcatgaagagtgcatcaaatcacccgtggttgagacagtccctgtttagtagcttaaattattctaggaccaactcttctcttatttaaggcactgtatttaattggatttcctgggctcatcattggttaaactgaagaccaagaaaacttggacggtggttaatcttccagactgtattttgttttttcctttctagccacatgactgtggcattgcacaaatacagtctctgtagggattttaaaagatttcagactgttttgatagaaaaagctaaattttaaaatgcatatctcacagttgcctacctgtcaaactgtgtgaaacctgccaatctgtgtagatcagagctccaaattttggattatcgggcctgtgcaagattgttaactaaggctgggaaataataagatttagagtcctaattttcaatatatctgaagataatgatgactttttaatgtaaaagtaattattgtaagaaaaagatttaattgttccatgtgtattttatttatggtagtttagaagacatgttttgatgaaaatgaacagccgcatgttcattcaagctgaagatgcatagctagttccacagagcatgcccacatggattgcatctggaatccattcacatttttatgatcatgactgatcagatttgcaaattcttaagggtgaaataggcctatttttgctattttggacaaataaatgattctatatgtgcaggtccttacacacttttctctaaagttaagagttaggacaatcctctggggagagtctagttcactgccctccctcagctgactccagagatggaggtagaaggaattgcctttcttttttaaacagcatcatcttgattcttagcttggacagcacctttaagctctaccccctacatcaaaatgcactttagtgccccttcacggtacctcgtgtggggtggggactgagaactctttgagatgaaaaaatttaaaaaaaaaaaaaa

SEQ ID NO: 57067 - DNA, 2209 bp, Homo Sapiens; identical to SEQ ID NO: 30589

SEQ ID NO: 57068 - DNA, 1056 bp, Homo Sapiens
gcacgaggttcgagagcgcgcagagtccagactggcggcagggcccgaggggccgacccgcagcgtccctggtctctccagccctcactcggaaccgcactgacaataccctcccctcccttgggctggacccctctctacagctaggagccaatggcagaagacaaaaccaaaccgagtgagttggaccaagggaagtatgatgctgatgacaacgtgaagatcatctgcctgggagacagcgcagtgggcaaatccaaactcatggagagatttctcatggatggctttcagccacagcagctgtccacgtacgccctgaccctgtacaagcacacagccacggtagatggcaagaccatccttgtggacttttgggacacggcaggccaggagcggttccagagcatgcatgcctcctactaccacaaggcccatgcctgcatcatggtgtttgatatacagaggaaagtcacctataggaacctgagcacctggtatacagagcttcgggagttcaggccagagatcccatgcatcgtggtggccaataaaattgatgacataaacgtgacccaaaaaagcttcaattttgccaagaagttctccctgcccctgtatttcgtctcggctgctgatggtaccaatgttgtgaagctcttcaatgatgcaattcgattagctgtgtcttacaaacagaactcccaggacttcatggatgagatttttcaggagctcgagaacttcagcttggagcaggaagaggaggacgtgccagaccaggaacagagcagcagcatcgagaccccatcagaggaggtggcctctccccacagctgaggggctggggctaggggaatagtttggaccttgtgcctcctgtgggaggctgaggactgcaagaggagagctagcagatatgcctgttcacccctctctggtacttgtggcttgctagtatgtttttatgataatctcgggcattgtttgcattgtgtttattaatagggttttgtttttattgtttccttttttacagtaaaggctgaatgacat

SEQ ID NO: 57069 - DNA, 1975 bp, Homo Sapiens
gggcctggttgtggaggccccttttgcaaaacctcagtctgaatttagtagacagaagtcactaggaatgccttgacaggatcctgccttagctaaggctccctccagctgcagagggtgtttttgttagactcacacactgcgtgaaactgctcagaatagagccatgatctcaaccacgaaatgggaacttagattttggagaaactaacggggacggacttctttcctagcctgagtgttgagcagtgtcatgccttggcgtttcagctcctcgttgtctaggtggtgaaatgacagaactcattcgcttctttgattggtgattttgaaataatctttcatcaagttccatctcctttaccctcatatggaatatatctctctgtctgttgttaaactacgatgacatgtctgtagctatcagaaagagaagctgggaagaacatgtgacccactggatgggacagccttttaattctgatgatcgtaacacagcatgtcatcatggactagtagctgacagcttgcaggcaagtatggaaaaagatgcaactctaaatgtggaccgcaaagagaagtgtgtttcactacctgactgctgtcatggatcagagctgagagattttcctgggaggccaatgggtcatctttcaaaggatgtggacgaaaatgacagccatgaaggtgaagatcagtttctttctctggaagccagcacagaaacactagtgcatgtttctgatgaggataacaatgctgatttatgccttacagatgataaacaggttttaaatacccaagggcagaaaacatcaggccaacatatgatccaaggagcaggctccttagaaaaggcactgcccatcatacaaagtaaccaagtttcttctaactcctggggaatagctggtgaaactgaattagcactggtaaaagaaagtggggagagaaaagttactgactctataagtaaaagcctggagctttgcaatgaaataagcttaagtgaaataaaagatgcacccaaagtaaatgcagtggatactttgaacgtgaaagatattgcacctgagaaacaattgcttaactctgctgtaattgctcagcaacgaaggaaacctgacccccctaaagatgaaaatgaaagaagcacctgcaatgtagtacaaaatgagttcttggatactccttgcacaaacagaggactgccattattaaaaacagattttggaagctgccttctgcagcctccttcctgccccaatggaatgtcagctgaaaatggcctggagaagagtggtttttcacaacatcaaaacaaaagtccaccaaaggtcaaggcagaagatggcatgcagtgtttacaattaaaggagaccctggccacccaggaacccacagataaccaagtcagacttcgtaagagaaaggaaataagagaagatcgagatagggcgcggctggactccatggtgctgctgattatgaaactggaccagcttgatcaggacatagaaaatgccctcagcaccagctcctctccatcaggcacaccaacaaacctgcggcggcacgttcctgatctggaatcaggatctgaaagtggagcagataccatttcagtaaatcagacacgagtaaatttgtcttctgacactgagtccacggacctcccatcttccactccagtagccaattctggaaccaaacccaagactacggctattcaaggtatttcagagaaggaaaaggctgcggtaaaatcagtaaagttggaagtggatgaagataagagcacaaagggatccaatttttccaactcggaagtggcaattggtttgtctccttacacctttccccagaagaggcttttccatgttgctggagaagaaaacatcacctaggccggtgtgtgcctggcagaacactgcactccaatttcctcgggcagccacaaaaaaaaaaaaaaaaa

SEQ ID NO: 57070 - DNA, 3179 bp, Homo Sapiens; identical to SEQ ID NO: 30320

SEQ ID NO: 57071 - DNA, 1309 bp, Homo Sapiens
cgggaatccctgcagctgagcctgtctctcacgggaccgggaagctggagagagccccaaccctgcccgctggggccgagctccctgctcctgcagcagtcccgtgccccacactctgagtctgccctatccacagctgctgggcctctctgtggccaccatggtgactcttacctacttcggggcccactttgctgtcatccgccgagcgtccctggagaagaacccgtaccaggctgtgcaccaatgggccttctctgcggggttgagcctggtgggcctcctgactctgggagccgtgctgagcgctgcagccaccgtgagggaggcccagggcctcatggcagggggcttcctgtgcttctccctggcgttctgygcacaggtgcaggtggtgttctggagactccacagccccacccaggtggaggacgccatgctggacacctacgacctggtatatgagcaggcgatgaaaggtacgtcccacgtccggcggcaggagctggcggccatccaggacgtgtttctgtgctgtgggaagaagtctcctttcagccgtctggggagcacagaggctgacctgtgtcagggagaggaggcggcgagagaggactgccttcagggcatccggagcttcctgaggacacaccagcaggtcgcctccagcctgaccagcatcggcctggccctcacggtgtccgccttgctcttcagctccttcctgtggtttgccatccgctgtggctgcagcttggaccgcaagggcaaatacaccctgaccccacgagcatgtggccgccagccccaggagcccagcctcttgagatgctcccagggtggacccacacattgtctccactccgaagcagttgctattggtccaagaggatgctcgggtagtcttcggtggctgcaggagagcgatgctgcgcctctgcccctctcctgccacctggctgcccacagagctctccagggcagaagtcgcggtgggctcagtgggtgccctgagcggggtctctcagactgacgtcaggccttggtgggctgcactctcacctggaggctccggggaagcatctgcctccaggaccattcaggctgttgacaagtcaactcctcatggctgtaggactgaggttcccaagtccttgtccctggtcctgtggtccctccaccttcaaaccagcaatggtgcattgagcaaattgtggtcaaatatacatcacatcaaatttaccatcttaaccattgttaagtgtatggtttgtggcattaaatacattcacattgttgtgcaaccatc

SEQ ID NO: 57072 - DNA, 2384 bp, Homo Sapiens
gtcgcaacaggaccggtccctgatggagctctcagaacgctacgggccggtgttcaccgtgcacctggggcgccagaagacggtggtgctgacggggttcgaggcggtcaaagaggcgctggcgggccccgggcaggagctggccgaccggcctcccatcgccatcttccagctcatccagcgaggtggaggcatcttcttctcatctggggcgcgctggagggctgcccgccagttcacggtgcgtgccctgcacagcctgggcgtgggccgggagccggtggctgacaagattctgcaggagctgaaatgcctctctgggcagctggatggctacagaggccggcccttcccgctggccctactgggctgggctccctccaatatcaccttcgcgctcctcttcggccgccgatttgactaccgggaccccgtgtttgtgtccctgctgggtctcatcgatgaggtcatggtcctcttggggtcccctggcctgcagctgttcaacgtccacccatggctcggggccctgctccagctgcaccggcccgtcctgcgcaagatcgaggaggtccgtgccattctgaggaccctcctggaggcgcggaggccccacgtgtgcccgggggaccccgtgtgcagctatgtggacgccctgatccagcagggacagggggatgaccccgagggcctgtttgctgaggccaacgcggtggcctgcaccctggacatggtcatggccgggacggagacgacctcggccacgctgcagtgggccgcacttctgatgggccggcacccggacgtgcagggccgggtgcaggaggagctagaccgcgtgctgggccctgggcggactccccggctggaggaccagcaggctctgccctacacaagcgccgtgctccacgaggtgcagcggttcatcacgctcctgccgcacgtgccccgctgcaccgcggccgacacacagctgggcggcttcctgctccccaagggcacgcccgtgattcccctgctgacctcggtgctcctggatgagacacagtggcagaccccaggccagttcaaccccggccatttcctggacgcgaatgggcactttgtgaagcgggaggccttcctgcctttctctgcaggtcagcagccctcggggccggggtggggcggcacctccagggctccaggggtgggacggccccagctccgcctgccgcctctgcacccacctcctgatctcaggttctgaaggcggctgtggtggctgctcctgtgctcccctggggaggtccccacccctcccctccaggagcaggcctggtgcagcccactctgtgcctggacatcccccgcaggccgccgcgtctgtgttggggagcgcctggccaggaccgagctcttcctgctgtttgccggcctcctgcagaggtaccgcctgctgcccccgcctggcgtcagtccggcctccctggacaccacgcccgcccgggcttttaccatgaggccgagggcccaggccctgtgtgcggtgcccaggccctaggagctcccccagcccccaggtcctcctgaccactcccctcccagccctgggtcctcccaccctctctcctcccaccccacagctcggactgctctgggagggccctgaggactcccaccctcacccccacccccacagggtcagcaactgcttccggttacacccaggactacccctgcccgaccctgtgggacccccacccctctgatgctgtctgcagctcagtccctgccagcccccaggagcgcctccagggccccgcccactctcccacccctgaagctgcactcccacccacctagctccccccagggccccccagcacctacagctggggctgcagggagacaacgggtggctgcaatccagccagagacaggcgcaggtgggtgtcctcagcgtgcgagccctgcaccccccaggtcctgggactcctgcagaccccactccattcccgctcctggaacacttcctgcagctgtgcctggaggcagtcggcctgcagtgccagactctgagccaagccactggggccatgcgtatgactggtgcagggaggcaaggcccacattctccttcagagacaggcactggcgccagaggcttccttggggcggggggagggcaccccagcccctgaagacaagcagcactgcagtggcaaaaatggaaacactgacccggtgcggtggctcatgcctgtaatcccagcactttgggaggccgaggcaggcgaatcacgaggtcaggagttcgagaccagcctgcccaacatggtgaaacctgtctctactaaaaatacaaaaaaattaaccgagaaaaaacaaaaaaaaaaaaaaaa

SEQ ID NO: 57073 - DNA, 5242 bp, Homo Sapiens
gttccgggtccgagcgcgcccccgggctcgggtcgtcatgagcctggactgcaccagccatatcgcgctgggtgccgcttcgccagcgcccgaggaaacttacgatcatctttcggaagtcccggtcacgcgggagcagttaaaccactatcggaatgtggctcaaaatgctcgaagtgaacttgcagcaactttggtcaaatttgaatgtgctcagtctgagcttcaagacctccgatccaagatgctttctaaagaagtctcctgtcaagaactgaaagctgaaatggagagctacaaggaaaacaatgccagaaaatcatctctccttacctctttgagagacagagttcaggaactagaagaagaatcagcagcactttccacttctaaaatcagaacagaaatcacagctcacgctgcaatcaaggagaaccaggaattaaagaagaaagttgtagagttaaatgaaaaattacaaaagtgttcaaaagaaaatgaggagaataagaaacaagtttcaaagaattgcaggaaacatgaggaatttctgactcaactgcgtgactgcttggatccagatgagaggaatgacaaggcatcagatgaagatttaattttaaagcttagagacctgcgcaaagaaaatgaattcgtgaaaggacaaattgttattcttgaagagactataaatgtccatgagatggaagcaaaagctagcagagaaacgatcatgaggctggcttcagaagtcaacagagagcagaaaaaagctgcctcctgtactgaagagaaagagaagctgaaccaggacctgctcagtgctgtagaagcaaaagaagctcttgaaagggaagttaagatcttccaagaaaggctgcttgctggccagcaggtctgggatgcctcaaagcaggaagtgagcctcctgaagaaaagctcttctgagttggagaagagtttgaaggccagtcaggatgcagtcacaacctcacaaagccagtacttctcatttagggagaaaatcgcagccctccttaggggcagattgagcatgactgggtccactgaggacaccattttggagaagattcgagaaatggacagccgggaagaaagcagggaccggatggtctcccagcttgaagcccaaatatctgagcttgttgaacagttgggaaaggagtctgggtttcaccagaaagctctccagagggcccagaaagcagagaatatgttggagactcttcagggtcagctgacacacctggaggcagagctggtttctggaggtgttttgcgagacaacttgaattttgagaaacaaaaatatcttaaatttctggatcagctttctcagaaaatgaagttggaccagatggctgccgaacttggctttgacatgcggctggacgtggttttagctcgaacagagcagctggttcgtcttgagagcaatgcagtcattgagaacaagaccattgcccacaatttgcagagaaagctaaagacacagaaagagagactggagagcaaagaattacacatgagcctcctccggcagaaaatagcccagctggaggaggagaagcaggcacgcacggccttggtggttgagagggacaacgcgcatcttaccatcaggaacttgcagaagaaggtggagaggctgcagaaagagctgaacacgtgtcgagacttgcacaccgagctcaaagccaaactggccgacaccaatgaactgaagattaaaactttggaacagactaaagccattgaagatctaaacaaatccagagaccaactggagaagatgaaggagaaagctgagaaaaagctcatgtctgtcaagtcagaactggataccacagaacatgaggctaaggagaataaagaaagggccagaaacatgatagaagtggtaaccagtgaaatgaagacactaaaaaaatctctggaagaagcagaaaagagagaaaagcagctggcagacttcagggaggtggtgtcgcagatgctaggcttgaacgtgaccagccttgctcttcctgattatgaaatcatcaagtgtcttgaaagattggtccattcacatcagcatcactttgttacctgtgcctgcctcaaagatgtgactactgggcaagagaggcacccacaaggccatttacagcttcttcattgaacactgtatctcttgagagaggtggccataagacatggcacacaattcccaatttcacaaattcctcatgtctttgagatttgatcagtttgtgaatattttatgctttgatgatatagtgagaatgcatcacttgcaaaaacgatctcaaaagtgtcagccttagataaacgttcagcattaaaaacgcctattatttcatttactagcattttaggatccagaagaattccaccagattgcatgagttagattgggaaatgggagtgggagataacattgggaggtatctattttaagtcaggggctttactagccgatttagttctcacaataaccatgtggagaagctgtgacatttttaatttacaacctttctggggctcagacataaagttacctatccaaggttgcagttgggtagtggtgggaccaggatggacaactcattggccctgcctcaaaagccatacctcttctcctgctacgcagaatctgtttctcctgaatctctgtgatgctggtgggaattgtttgcatagaggaaggacaataaccctgccatcgtgagttaatgtccgggctggtcatagtggttcatgcctgtaatcccagcactttgggagtccaaggcaggcatatcatttgaggtcaggagtttaagaccagcctggctaacatagtgagaccctgtttctactaaaaatacaaaaataagccaggtgtggtggtgcatgactgtaatcccaactactcagcaggagaagcacttgaacccaggagacggaggcggcagtgagccaagattgtgccactgcactccagcctgggcgacagagtgaaactacatctcagaaaaaaaaaaaaaaaaaaaaaaagttaatgtccaaaaatgacagatttacaagtgtaagctatatgatttcttcaaaaagcaaaagcaatatacctaattcatttggatcaaacttacataggtctcaggtcctgtaagaaacttgcctgttctaactgttgctaccagattatatctggtggtaattgttaatgtttcagcagggctggtctcagtcctttaaaatggaaagctttatttggagcccaaccctataagatgaagaaatcctatatagtcttattcaccaatatatccaatacacccacagcaatggtacctttttaagatcaggattttattatgaattcctgtcactttctgttttccatttaaatttctattttacaaatttttcagggaatcatattcttaacttcactgagaaaaatgtgttactcttttggacaatttatcttatttctatcatataagatgtatttttttattgtccttaaaagaagctctagcatgaaattaaaggaaagggaaagaaatagatctggtgcacccgaacattaggagaaaatgaaaaatatacaaccaaccgttcgtgagtcatcaaaaagtcaaagtcagcctggccaacatggcaaaactccgtctctgcaaaaaatacaaaaatgagcccggtatgttggcatatgcctgtaatcccagctactcgagaggctgagacacgaaaattgcttgaacctgggaggcggaggttgcaatgagccgagatcgcgctactgcactccagcctgggcaacagagagagaccttgtctcaaaaaacaacaacaacaaaaagtcaaagtcataataagcaaattattggcttctttcttctagactaaaagaaattaaagagatgaaacaatcaattgcaagggtcaaaactagattggatcttggtttgaatgaaaaaaagcataaaatattcttgcaataattgtaaaaatttgaatgtggactaagtcctagattatattaaaatatttttaattttttaagcttgacaaatgcactgattgttatactttaaataactaaaaatctgagaatccacagtgctacagacaataagtgataaaatgggaaaaaatagtgaagatcttcttttaggaaaactaccaataaatgtagaatggatgattccaaaaaaaaaaaaaaaaagaagaaagagagaaagaaagaaacagaaaaacctaaaagaaagcgaatgaatttgacacctgttggttggatgacagaccacacagagggagagtgaccaggctttgcttgtggagcgggcatccctgcctagctatctccttcatgtgcaaggacagtataagtagtattttgcatgtgagtaaacacacctgcgcagccctggctgaggtcactaggctggccagaggcaggacaggcagtcttgaatttcctctaggggaggcctgcagttttccccaccaaccccttttcacatgctccaaagatgtagtagtgtctgctgttttggatcgaaaatcaccttgagtggaggaagtgacttcactgggtctctggaggctctcggagcttgagtggctctgccccaccctgaatcatgcacccataaatgcagttatgggtggatgtgggtgtatgagagtggagattgtttttgtacattctctttgttttcattttccaaatataatctttaataaacttgatttagtttcttgggaaatttattttctacgctattcaaagatattttaaataatattttaaaaacatgaaatttttttttcatttttgatttgatatcattaattttatatcaggattcatgtaagagactaaaaatgatccatagtggttagtactgtaatttctgtttattacatgaaattacattccatttatccaaatatatgtttatataatatttccactgtgtgactctagtgatctttaacatacacagaatgatctacagtgatctttaacatactcagaaatatgaaaaatgtttgaatatgatctttagggacttctaatgaaaagggtatatgaaatgggaacaataaattctgtacatgtatacagtccatatacacattaagtgtttgtcatttggacaaattgaaaacttttaataaagccattttcttctttgttaaaatgccaaaaaaaaaaaaaaaa

SEQ ID NO: 57074 - DNA, 2248 bp, Homo Sapiens
tgggctcggctccgcactgctagctgcgcgccgccctggacggggcgcaccgactgcgcgcgcggctgcgggcaaacatcgggagtcctgcctcagctgccgcttctccagcagcagcttcaggcttctcccgcaggagcttcgggcttctcctggtagagacgtgggaacttttcttctcctggcgaggctgcagaggtgatgggccgctcccggggctcccgcggggaggcggcacggtgagcgtcctcgggctccggtgcggcgatcagtacctagttccggacgcgccggtccgacttggatgccggctctagtcgagtcttctgagctacgataattttttggaacggcagaaatgattggttctagcaacagatgggaatttggagtcactctgaaatatatcctggaataagtgtgtttgactagaaccacatcttatgaggtccccaaggatgagagtctgtgctaagtcagtgttgctgtcgcactggctctttctagcctacgtgttaatggtgtgctgtaagctgatgtccgcctcaagccagcacctccggggacatgcaggtcaccaccaaatcaagcaagggacctgtgaggtggtcgccgtgcacaggtgctgcaataagaaccgcatagaagagcggtcacaaacggtcaagtgctcttgcttcccgggacaggtggcgggcacaactcgggctcaaccttcttgtgttgaagcttccattgtgattcagaaatggtggtgtcacatgaatccgtgtttggaaggagaggattgtaaagtgctgccagattactcaggttggtcctgtagcagtggcaataaagtcaaaactacgaaggtaacgcggtagcgaagagagaggtgtgcttcaatcctggaggggcagcaggaggcggagctcttttgcttggattcccatcatggcccctctgcagaaaattgtctaggatttcagcaacttcatatttgtatatgtgagctgtgagaggtggcattcacttaactggcccagccctctctgcttcgtgattttatttcattgaattataaccacaagccaccacccatttgacatcctctctggattcccaaggagcatacctccaaaatccgagaagagcaaatcagagtcttcaaaatggatcaccactaagggcatgttcattcttcactttctttctgcttttacaaaagaacttggatgtatgttccaaagggtcctcattctgttcctcttttgaacttttccttttgtccttgtattaaagtggttttaaaggggtctaaaaagattttggcaaaacatatttgcagatgtagattagctggtgaagaaaattactgctagagatcaactgattaactggtaaagaacgtttattttataacccttgaagaatagaaggacatagttggattattgtgtgtgcattgtatttttacttctattttttttttgctttccattttccagttagcagagataaaatgagagcgttttaacttcaatgtaccattttactgagtgctaaggaagcatatcaattccaatattttataaccaaagctctatcagaacatatttataaaacttgttggaatttttacggcttttgtgtagtcatgtaggtaaatcatttaaaatataaaacaatctcaatttagatcaagggttatttcttagatcaaatttatgccaattatatgaaaagattttaactccgagacaggagtctttcagtgctgaatttttagactgtaaatgagttcttcttaacttagctgtttccctacttctgtgacttctgtgttagccatcttatttctttaaaatctgagtcctgattggcttaatgattttgcagcagacatgtctccacatattctcaaatgctgtcatgcggaaacgtatgaaacagatgaagaatgactgacccagattttagatgtataatgttgttaaagtacatactactgtaaaaatatgggatgaattttatatattaagaaatgccaaaaacatagtttctgcaccaagttaattatccctgtcctttcacatttatagggggaaaataaatactttatagcctaacagttatttgatgttattcttgcagagggaatggaaaggaatggaaagatttgttggcgtaatttttgaatatttgttatgatcatatgaataagtaaaaaaattcatcctgctgatggcaaaaaaaaaaaaaaaaa

SEQ ID NO: 57075 - DNA, 2546 bp, Homo Sapiens
cgctttagcagcagccgctgctgccgccgccgggggagaggcagcctattgtctttctccgcggcgaaggtgaggagctgtctcggctcggcccgcgggggagccccgggagccgcacggagatggaggaggacatctggacagtgagcaggaggcgcttcggcccatgccgaacatcccaggggacctggagagccaggaggccatggtggcatttttcaactccgctggagccagtgcccaggaggagcaaagggtgtgctgccagcccctggctcacccagtggcctcgtcccagaaaaagccagaggtagcggccccagccccagagagtgggggtgagtctgtgtttggggagacccaccgggccctgcagggggccatggagaagctgcaggaaagtacatcagccagggggcagtgtcagagacgcagcactgggagaggaggacatcgtcaggctggcccaggaccaggaggagatgaaggtgaacctgcaggagctgcggggcaggtgttgcagcttgtgggagaccacaaggaggggcatggcaaattctgaccattgcccagaaccctgctgatgagcccactctaggagccccaatagcccaggagcttgggtgtgctgacgagcagggtggtgagtagagccctcaggcggggtgggcaggcaggagcaggggaggctcacactgtgctcagattcccaccccccctccctctctctgaagatctttgtgaggtgagcctcactgatagcgtggaggctgcaccaggagaggacagggagggttctccccacgacaaccccactgcacagcagatccagcagctgcttcctgtaatgcaggactccccaggagcacccaggcatgggcagcaacccctgcatgccattctttttgggctcccgagaacagggagataaacaccaccatcatctgagagccgggaaggggaaggcgtaggtgtgggcgtggcaaggttcctggaaaagaggggctggaagggaaaggggaggaagatggagggagaagctagagcttcataggtagtgcctgggggctgtggcggtcctccccaccccacacacactggcctctctcatggcacccaggcagtccacccacagttcagaccaatgctcaactcccccggcttccctcttctgtggtcaccccatcttccaacccactggcccagggccacctcttgcttggggagccccacccaacagccaccaagcctgacagaaggaacactgcttgaaccaaaatggtgaagctgtaagggatggctggctggagtgagcgccagaggcccctctctgggcagtcagaaagcccagggtccactgaagggaccctggggaaggcagggagggcaggtagctagatgccactgcccatagacttataagtctaagaggggaacctcaactggttggcggggggctgcaggttgcataggtgaggctgggcccttcctgctgggaaaagcagaagagggagactccgtggcaggaaaggcaggtgggctcgctaggcggagctcagctgggccagcaagcactgtggtctccttggctgaatagcacaggtgacccctaggagcaacaggccaaggtccgtgagcctgctggctggcagtagtgcttcagtagtgctggccagggacccagccttcagtcacatgctagcagctgtgatggtacctgggagggagggaagggggctgtgtgtccttgcatggcctatgaagtgtgttgtgggataaccgtgtgtataggactctcaggcttttatcctagatcaccactggattgctgacagatagaggacgtgggaccgtgactatcacccctaatctgcagtggatttggctctcggcactcccaggctgggagctggatacctgccctggcagcatgactcagactgcatgacagtcacagactcgcctctgctcctgtggtccagtggccggacaccccctgggatggctcaaaggagtcaggacttggaagtggggacatcagggtagctgaaggaaatccacacacccagagcatctcggagttcagactctcagacctgaagtaggcgcccccgggactgggctaggagttggacggaatggaggatggaggacagcgagaagaaaggaagagaaatgcaaagtgtgggcagccgccaagagtgaaaatagagggaagtgtcatgcaagtgctggacagaaggcggcaggtgggacgagccccacagccccctcctcaaaaacgaccacctccaggactcagtgatccctggggggcaggctctgccagccctggctgccttgctgggcccttctgggactgtgcgctggacttggagccccttggagtatggcttttcacacgggcttctataccgcttcgactggaagatccacctccccactgccttttctcactcagatggggacaccgaggtccagaggaaaagacacctgtcaaatgtcacagatctgggaggggacttaagacttatcatgccaagagg

SEQ ID NO: 57076 - DNA, 2400 bp, Homo Sapiens; identical to SEQ ID NO: 30723

SEQ ID NO: 57077 - DNA, 2466 bp, Homo Sapiens
ggctgagtggtttgctccttcccctctctctgggaggctgagcaggggtgccgggttgctcaggccatgggagccacacctgttattgctgcctctgatttgtgtgacactgagaagcccacaggcctgtccctccaactcggtggaccctctctgtgtgcatttggtgtgtgagccagctctgagaagggttcagaagccactggaggcatctggggacctcagcttccatgccatctctgcctcactcccacagggtaatgttggactcggtgacacacagcaccttcctgcctaatgcatccttctgcgatcccctgatgtcgtggactgatctgttcagcaatgaagagtactaccctgcctttgagcatcagacagcctgtgactcatactggacatcagtccaccctgaatactggactaagcgccatgtgtgggagtggctccagttctgctgcgaccagtacaagttggacaccaattgcatctccttctgcaacttcaacatcagtggcctgcagctgtgcagcatgacacaggaggagttcgtcgaggcagctggcctctgcggcgagtacctgtacttcatcctccagaacatccgcacacaaggttactccttttttaatgacgctgaagaaagcaaggccaccatcaaagactatgctgattccaactgcttgaaaacaagtggcatcaaaagtcaagactgtcacagtcatagtagaacaagcctccaaagttctcatctatgggaatttgtacgagacctgcttctatctcctgaagaaaactgtggcattctggaatgggaagatagggaacaaggaatttttcgggtggttaaatcggaagccctggcaaagatgtggggacaaaggaagaaaaatgacagaatgacatatgaaaagttgagcagagccctgagatactactataaaacaggaattttggagcgggttgaccgaaggttagtgtacaaatttggaaaaaatgcacacgggtggcaggaagacaagctatgatctgctccaggcatcaagctcattttatggatttctgtcttttaaaacaatcagattgcaatagacattcgaaaggcttcattttcttctctttttttttaacctgcaaacatgctgataaaatttctccacatctcagcttacatttggattcagagttgttgtctacggagggtgagagcagaaactcttaagaaatcctttcttctccctaaggggatgaggggatgatcttttgtggtgtcttgatcaaactttattttcctagagttgtggaatgacaacagcccatgccattgatgctgatcagagaaaaactattcaattctgccattagagacacatccaatgctcccatcccaaaggttcaaaagttttcaaataactgtggcagctcaccaaaggtgggggaaagcatgattagtttgcaggttatggtaggagagggtgagatataagacatacatactttagattttaaattattaaagtcaaaaatccatagaaaagtatccctttttttttttttgagacgggttctcactatgttgcccagggctggtcttgaactcctatgctcaagtgatcctcccacctcggcctcccaaagtactgtgattacaagcgtgagccacggcacctgggcagaaaagtatcttaattaatgaaagagctaagccatcaagctgggacttaattggatttaacataggttcacagaaagtttcctaaccagagcatctttttgaccactcagcaaaacttccacagacatccttctggacttaaacacttaacattaaccacattattaattgttgctgagtttattcccccttctaactgatggctggcatctgatatgcagagttagtcaacagacactggcatcaattacaaaatcactgctgtttctgtgattcaagctgtcaacacaataaaatcgaaattcattgattccatctctggtccagatgttaaacgtttataaaaccggaaatgtcctaacaactctgtaatggcaaattaaattgtgtgtcttttttgttttgtctttctacctgatgtgtattcaagcgctataacacgtatttccttgacaaaaatagtgacagtgaattcacactaataaatgttcataggttaaagtctgcactgacattttctcatcaatcactggtatgtaagttatcagtgactgacagctaggtggactgcccctaggacttctgtttcaccagagcaggaatcaagtggtgaggcactgaatcgctgtacaggctgaagacctccttattagagttgaacttcaaagtaacttgttttaaaaaatgtgaattactgtaaaataatctattttggattcatgtgttttccaggtggatatagtttgtaaacaatgtgaataaagtatttaacatgtaaaaaaaaaaaaaaa

SEQ ID NO: 57078 - DNA, 2308 bp, Homo Sapiens
aagccactttgacaacgtttctgagccaggggtgaccatgacctgctgcgaaggatggacatcctgcaatggattcagcctgctggttctactgctgttaggagtagttctcaatgtgatacctctaattgtcagcttagttgaggaagaccaattttctcaaaaccccatctcttgctttgagtggtggttcccaggaattataggagcaggtctgatggccattccagcaacaacaatgtccttgacagcaagaaaaagagcgtgctgcaacaacagaactggaatgtttctttcatcacttttcagtgtgatcacagtcattggtgctctgtattgcatgctgatatccatccaggctctcttaaaaggtcctctcatgtgtaattctccaagcaacagtaatgccaattgtgaattttcattgaaaaacatcagtgacattcatccagaatccttcaacttgcagtggtttttcaatgactcttgtgcacctcctactggtttcaataaacccaccagtaacgacaccatggcgagtggctggagagcatctagtttccacttcgattctgaagaaaacaaacataggcttatccacttctcagtatttttaggtctattgcttgttggaattctggaggtcctgtttgggctcagtcagatagtcatcggtttccttggctgtctgtgtggagtctctaagcgaagaagtcaaattgtgtagtttaatgggaataaaatgtaagtatcagtagtttgaattaatttgagaagtacacttgttttcaaagtcatctttgagatgatttaaaaaatcaacccttcacgtagaaagcacgttgtaaatgcataacactctcatatcagtggttgatttgggaaaggtggagagaattttcaattagttttgtgttgtactattcaaattttttacctcttcactgtgtgtagagaaaggagaagggaaggaggatgagaaggaacggaagtcatcctgaaaataaaagtacaggactttttttttttttttttgagacagggtctcaaaaaaggctggagtacagtagtacagtggtgctatctcagcttactgcagcctcaacctcctgggctcaggtgattctcccatctcagcctccctagtagctgggactacaggtgcgtgccactatgccaagctaatttttgtatttttagtagagatgggggttttccatattgcccaggctggtcccgaactcatggactcaagtgatctgcctgcctcagcctcctaaagtgctgcgattacaggcatgagccatcgcgcctaaaggacaggacctttttattgtatttctttaaagaataaatacataacctgaatgcaatcaagtctttagatctaattctcagcttgcagggaacactaggacaaatccaaaaagtgggtcagcgggcacagaatggcccaattttcaacaggaaaatgttataaaagaaaaatatttttgagggaactgttatagattaagagaatagaggcatgtttcagctaaacacatgtaaactttgtcagagataattgggaggagtatgtagaagaatcggattattgttaattttggtaggtctgataatggttttatagtataaaggctgagtaccccttatccaaaatgattaagatcagaagtgttttggctttcacatttttttggattttggaattttgcctataataatgagacatcttggggatgggatgcaagtctaaccacaaaattcatttatgtctcatacacactttgaacacctggcctgaaggtaatttcacacaatattttaaataactttgtgcatgaaacacaattttgactgcattttgactgcaactcatcacatgaggtcaggtatggaattttccacttgtggtgttacgttactggctcaaaaagttttggatctcggagcattctggattttgaatttttggattagtgatgctcaacctgtatacagaaatgtcctcatttttaaaaaaagaaatgcatatttatatgttttaaaattacttcaaccaaaagcaacggggagatgtttactgttatatttaggtgacaggtacatggcaattcattataccctcctattttcctatgtttacattattcattaattaaaaaacaatacctagaaaaacccaagactttcaaaagctattttctatatgtgccaatctttaaaaaacaggataacaagggtatttatcacattaaaatgttgtaaaacagcaaagctaaaatctaaaaaaaaaaaaaaaaaa

SEQ ID NO: 57079 - DNA, 4826 bp, Homo Sapiens
gggtcgaggtcgacggtatcgataagttttttttttttttttttttttttttttcctttcccctccccctccctctccaagccggaggggtcctgaggtgacagcgcctgcaactgaaatttcagcagcgggagaagatggacaagagaaagctcgggcgacggccatcttcatccgaaatcatcacagaaggaaaaaggaaaaagtcatcttctgatttatcggagataagaaagatgttaaatgcaaaaccagaggatgtccatgttcaatcaccactgtccaaattcagaagctcagaacgctggactctccctttgcagtgggaaagaagcctaaggaataaagtcatctctctagaccataaaaataaaaaacatatccgagggtgtcctgttacttccaggtcatcaccagaaaggatacccagagttatattgacgaatgtcctgggaacggagttaggaagaaaatacataaggaccccacctgtaactgagggaagtttgagtgatacagacaacttgcaatcagagcaactttcttcatcatctgatggcagcctagaatcttatcaaaatctaaaccctcacaagagctgttatttatctgaaaggggctcacaacgaagtaagacagtagatgacaattctgcaaagcagactgcgcacaataaagaaaaacgaagaaaggatgatggcatttctcttttaatatctgatactcagcctgaagaccttaacagtggaagtagaggttgtgatcatctcgaacaggaaagcagaaacaaggatgttaaatattctgattcaaaagtggaactcactctgatttccaggaagacaaagagaaggcttagaaataatttacctgattctcaatattgtacttctttggataagtcaacagaacagacaaaaaaacaagaagatgactcaacaatatccactgagtttgaaaggccaagtgaaaactatcatcaggatccaaaactgcctgaagaaattacaactaaacctacaaaaagtgattttactaagctatcctcacttaacagtcaggagttgactttgagtaatgccaccaaaagtgcctctgccggttcaaccactgaaaccgttgagtactctaattccattgatattgtggggatttcttccctggttgagaaggatgagaatgagttgaataccatagaaaagcctattctaagaggacataatgaagggaaccaatcactgatctcagctgaaccaattgttgtttccagtgatgaagaaggacctgttgaacataaaagttcagaaattcttaagttacaatctaagcaagaccgtgagacaactaatgaaaatgagagtacttctgaatcagcattgttagaactaccattgattacatgtgaatctgtacagatgtcatctgaattatgcccatataatcctgtcatggagaacatttccagtattatgcctagtaatgagatggatctacaactggattttatatttacttctgtttatattggtaaaataaaaggagcttctaaaggttgtgttacaatcacaaaaaaatatattaagatcccatttcaagtgtccctgaatgagatttcattgctagtggataccacacatttaaagcggtttgggttatggaaaagtaaggatgataatcacagtaaaaggagtcatgctattcttttcttctgggtctcttcagattatcttcaagagattcagacccaattagaacactctgtattaagccagcaatcaaaatctagtgaattcattttccttgaactacacaatcctgtttcacagagagaagaattgaagctgaaagatattatgacggaaataagtataatcagtggagaattagagctttcttacccgttgtcttgggttcaggcatttcctttgtttcagaacctctcttcaaaagaaagttcttttattcattattactgtgtttcaacttgttctttccctgctggtgttgctgttgctgaagaaatgaagctgaaatcagtatctcagccctcaaacacagatgcggccaagcctacttacaccttcctgcagaagcaaagtagcggttgctactccctttctattacatctaatccagatgaagaatggcgggaagtcaggcacactggacttgttcagaagttgattgtatatcctccaccacctactaaggggggattgggagtaactaatgaagatctggagtgtttagaagaaggagagtttcttaatgatgtaatcattgatttttaccttaagtatcttatattggagaaggcatcagatgaacttgttgaacgaagtcacatttttagtagctttttctataaatgcttgacaagaaaggaaaataatttaacagaagataatccaaatctttcaatggcacagagaagacataaaagagtaagaacatggactcgtcacataaacatttttaataaagattacatctttgtacctgtaaatgagtcgtctcactggtatctcgcagtcatttgttttccatggttagaagaagctgtgtatgaagattttccacaaactgtatcccagcagtcccaggctcagcagtcccaaagtgacaacaaaacaatagataatgatctacgtactacttcgacactgtctttgagtgcagaggattcccaaagtaccgagtcgaatatgtcagtaccaaagaaaatgtgtaaaaggccatgtattcttatactagactccttgaaagctgcttctgtacgaaacacagttcagaatttacgagagtatttagaggtagagtgggaagttaaactaaaaactcatcgtcaattcagcaaaacaaacatggtggatctatgccctaaagttcctaaacaggacaatagcagtgattgtggagtatatttattgcagtatgtggaaagcttcttcaaggatcctattgttaactttgaacttccaattcatttggagaagtggtttcctcgtcatgtaataaagaccaaacgggaagatattcgagagctcatcttgaaacttcatttacagcaacagaagggcagcagtagctagttaatctgtacaaacatgacacagatgttctctaagattactggaaagccccttaccagcatttgtgttagccagctcacagagaagaaaataacttgcagtagttttataataagtcattggaacattatttaaaatatgtaggacacattattagaattgttgggatctcatagatggaatgggaatgggggtgatatagataaacttactagatataaattaaaattttataaatatttcatatttttctgagtaaatatgattggattatgcaacagcatatgtaatatgggaatgttttgtagataataaaacttacatgatctgtacttccacgtgactgggtgctgaggggagttaaagcctccctggtgccagccccagtgcttgtcaaatttgctgacaggtcacatcatattgtaattctattctttgcagctcaagcatgcagtatgaatactgtgtattttttaaaaaaataatttagtatcaaggcttcagaaaatgccatttacggcatcccttctgtatgtaacaaaaagacattcataatgttaggaagatgataaaaattcgctcttttaaagtgcagcttattattctcaattgctaaatacgattactctgctttttttttttcatttcttttgatgtcatatgtgagtatcttataatttagttcatttgttcagggtaaaatttgaaacaaaaaattttacctgtgcaaaatagttttttaaaaattatacatgtagctcaacttgaggtactgctatataaatattcactcacattatcacggaatttatgtatagtttctctaatatagaagataaaattggtgtcctcataactttaacaaagaaaaccctcagtcctatttattaatgggtagaattaaatatataattttatagctcagtttacccagtattcatctgcaaagccagattgctctcattgcttttatatttttaaattgtagcttttagagacctatgatcctcatggaacttaattttttattaaatattcaggtaacagttctgaattcatgtgataatggtggcattatatatgattaaacacttcagaactttctaatgttatcaggagtattttgagggagatatgattatattgtattttctcagataagaaaaatgttttttaacaatattattttaatctgttttaagcatctcttagatttacattataactacataaagcagtgaagcaaaggcaaattaagataaagctagaaagtctgaacattttatttcaaaatcatacgaatcggggtcagttaagcctcagtattcttagcttttgttgattttggcactatctttatattattaaatatatttgttgtttggatatttcatataaagatggctataattacatatttcattcccaatttgtgtgtgttggggggtacttttaaaggtgactattgttttgtacatctaattttgggaaaccaagtctataagacatcttgtgatttcttaatgtttttgtttgtatgtttttcaaagatatcactgtcctttatcatgttttgaagattgtttaaaattcattttcctaaattaatgtgcaagtaatgttttgaggatatcggtgttttatattaaacatatttccaattcaaaaaaaaaaaaaaaaaaacttatcgataccgtcgacctcgatgatgatgatgatgatgatgatgtcgac

SEQ ID NO: 57080 - DNA, 1450 bp, Homo Sapiens
atgcacaccgtggctacgtccggacccaacgcgtcctggggggcaccggccaacgcctccggctgcccgggctgtggcgccaacgcctcggacggcccagtcccttcgccgcgggccgtggacgcctggctcgtgccgctcttcttcgcggcgctgatgctgctgggcctggtggggaactcgctggtcatctacgtcatctgccgccacaagccgatgcggaccgtgaccaacttctacatcgccaacctggcggccacggacgtgaccttcctcctgtgctgcgtccccttcacggccctgctgtacccgctgcccggctgggtgctgggcgacttcatgtgcaagttcgtcaactacatccagcaggtctcggtgcaggccacgtgtgccactctgaccgccatgagtgtggaccgctggtacgtgacggtgttcccgttgcgcgccctgcaccgccgcacgccccgcctggcgctggctgtcagcctcagcatctgggtaggctctgcggcggtgtctgcgccggtgctcgccctgcaccgcctgtcacccgggccgcgcgcctactgcagtgaggccttccccagccgcgccctggagcgcgccttcgcactgtacaacctgctggcgctgtacctgctgccgctgctcgccacctgcgcctgctatgcggccatgctgcgccacctgggccgggtcgccgtgcgccccgcgcccgccgatagcgccctgcaggggcaggtgctggcagagcgcgcaggcgccgtgcgggccaaggtctcgcggctggtggcggccgtggtcctgctcttcgccgcctgctggggccccatccagctgttcctggtgctgcaggcgctgggccccgcgggctcctggcacccacgcagctacgccgcctacgcgcttaagacctgggctcactgcatgtcctacagcaactccgcgctgaacccgctgctctacgccttcctgggctcgcacttccgacaggccttccgccgcgtctgcccctgcgcgccgcgccgcccccgccgcccccgccggcccggaccctcggaccccgcagccccacacgcggagctgcaccgcctggggtcccacccggcccccgccagggcgcagaagccagggagcagtgggctggccgcgcgcgggctgtgcgtcctgggggaggacaacgcccctctctgagcggacccggtgggaatccgagcggctccctcgggagcggggactgctggaacagcggctattcttctgttattagtatttttcttactgtccaagatcaactgtggaaatattttggtctcttgtgacgttcggtgcagtttcgttgtgaagtttgctattgatattgaaattatgacttctgtgtttcctgaaattaaacatgtgtcaacacaggactttctggatcattccagaaagtgtcagacgtttt

SEQ ID NO: 57081 - DNA, 711 bp, Homo Sapiens
cttttttttttttttgcgaagtgggctcgtgggttggcagtatgagagttgtaatggcccgactgttgagtgagggggagcaggggatcccaacggcttgcgctgcctttgcgcagcagccggcgggcgagccacgtcgcggcctggctggggtaggagagggcggtccccagtgcagttgggtgaactaccgttgcacactggagtttctggtgtctttgcttggaactgacctagctcgtggcagggggaactcggctagcggccccacagcccctgctgactcaaaacaactaatgaactctggaagcccagccagggacaatgcaccttcacagagattctgcactaatctgagtgaaggtctaaggtttggaatctccccctcatggagagaagctttgtatggctgtcatgcttagacagtgattcctgcaacttgaccttcaggctgggagaggtggagagccatgcctgttctccttccttgctatggaatttgctgacacaatatcttccgcctggtgctgggcatatcctaagaacttacaactttcctgtattatcctgtgtgagcagctgtcaccttattgggggaaaaatgcctgaaaattagggggcacttcaagtagatagcttctatttcctatatttgtcttatatacaagtatttgcttttatcaaaataattccaataaagcattttaaagt

SEQ ID NO: 57082 - DNA, 3965 bp, Homo Sapiens
ccacgcgtccgcacggaggatcgcgggaggctgccgcctcgggacaccccactcacacagagctgacgcaagttggacagaaggaggtgttggggtgaggtggtggtgttgattggcttgtctcgttcactcccactggtctttaaatcaatgtctagatctctaaagtttcatataaatcaaagctgttacacgggtctgccattccaaacaagtcaggaaagcctgcacaggactggataaataattaagaacagagtgttctgaacatcaacacaaagtggaagaaccttaagctgaaggtacagtatattatttacactgaaggggcttgtgtgtggacaagaaagcgctgacagctcaaatggatcccatggaactgagaaatgtcaacatcgaaccagatgatgagagcagcagtggagaaagtgctccagatagctacatcgggataggaaattcagaaaaggcagcaatgagcagtcaatttgctaatgaagacactgaaagtcagaaattcctgacaaatggatttttggggaaaaagaagctggcagattatgctgatgaacaccatcccggaaccacttcctttggaatgtcttcatttaacctgagtaatgccatcatgggcagtgggatcctgggcttgtcctatgccatggccaacacagggatcatactttttataatcatgctgcttgctgtggcaatattatcactgtattcagttcaccttttattaaaaacagccaaggaaggagggtctttgatttatgaaaaattaggagaaaaggcatttggatggccgggaaaaattggagcttttgtttccattacaatgcagaacattggagcaatgtcaagctacctctttatcattaaatatgaactacctgaagtaatcagagcattcatgggacttgaagaaaatactggagaatggtacctcaatggcaactacctcatcatatttgtgtctgttggaattattcttccactttcgctccttaaaaatttaggttatcttggctataccagtggattttctcttacctgcatggtgttttttgttagtgtggtgatttacaagaaattccaaataccctgccctctacctgttttggatcacagtgttggaaatctgtcattcaacaacacgcttccaatgcatgtggtaatgttacccaacaactctgagagttctgatgtgaacttcatgatggattacacccaccgcaatcctgcagggctggatgagaaccaggccaagggctctcttcatgacagtggagtagaatatgaagctcatagtgatgacaagtgtgaacccaaatactttgtattcaactcccggacggcctatgcaattcctatcctagtatttgcttttgtatgccaccctgaggtccttcccatctacagtgaacttaaagatcggtcccggagaaaaatgcaaacggtgtcaaatatttccatcacggggatgcttgtcatgtacctgcttgccgccctctttggttacctaaccttctatggagaagttgaagatgaattacttcatgcctacagcaaagtgtatacattagacatccctcttctcatggttcgcctggcagtccttgtggcagtaacactaactgtgcccattgtcctcttcccaattcgtacatcagtgatcacactgttatttcccaaacgacccttcagctggatacgacatttcctgattgcagctgtgcttattgcacttaataatgttctggtcatccttgtgccaactataaaatacatcttcggattcataggggcttcttctgccactatgctgatttttattcttccagcagttttttatcttaaacttgtcaagaaagaaacttttaggtcaccccaaaaggtcggggctttaattttccttgtggttggaatattcttcatgattggaagcatggcactcattataattgactggatttatgatcctccaaattccaagcatcactaacacaaggaaaaatactttctttttctattggaaatggttacaagttatactccaaaagatatttgaattatcttgattggaatgttattcataggaaataacaggaagattccaaagacgtttaccagtaatatcaccaggcacctgcagaagaggaaaatcactgtttttgtcaaggatggttgtgtatgtgtttaaaataaaacctgtggtgcacatttctacccaggttttgctagagcagtgtgagatgatgaaggtgtatttttgctgctttacgagcagaataagggtaactgcatgtaacaatcatcagatagtactctttcccctgccgtctcctcatcctgcaccccctaaaaaagtaccaaacatttgcattctcagaacatcaaacaaaaatgccctggtggcaaagctatcaccatttaatgtcttctctcagtcttgcaccaaagtctctggtctgtttactaacagaggcaaaaggcatgtcttaggaactgtttctgtttctgtaaggtacatgaatggtcaaacaccagtctagagcatcttattgtcaacagcaaaataatattttgcccaccctgtttgtgacattgagttgtgacttctatattcaatagatttttgtaaatgttaaaacatctatatttaaatgttaaaacactaaatatagagaggggctttatttcaatcatagagcaacaacaaaaataatgcttatagctaaactgcctgttctagaaagcatctgctttttcatgttattcctaaatcctcttgtcatacttttgtcattgaacaatgctctccctctcgtcttccatcctcattcagaatttttagaagaccacaatcgtggagatacactacccagtattgtttgatacatttttatttgataaacattcagtgcaggaaactgtgatttgctatatgtttatgtatataatcttattctgtagtcatcagaatgttaatgtaaggtacatttgatttttattttttacatgtgtagttttctttcttcacagtcaaagcatttatattattgggggtgggggcagggaattaagttggtgggctcgaaaatcccattcatatgtatctgtctacaaatgtctggggataatttaaatttgaaacctaagttatatatagtttggcaatgctcttcttcaatatttacaataataggatgatctacaagaaaataagtttctttttgcaaatttttatcatactaaagttgttcttttaatttagcatatctaaaataggaattagttcagtttagctcacacaggtgtttgctgacattcattggccatttaatacagtgttgagtggttctccgtaaaagtataagtgctaacactacgaagaaatgcacacgatcattcttgctcacttctataacaaacttacataaaatggatttaaaaattcctactcacagcctaaaacttctggagttcactacctttttttcaaatcatagtaagatcacttgtgtattttatattttagtaaagccaattatgaagtacaagtatcatacacgtacttttgagctactattatttgaaaaaaatctgccaaatagcatctttaggatatatttacattttcactcatctaaaaagtatacaaaaataaaaagtggaaaaaggtatcttctgaatgttcaagagcatcctatagtgccaaataataaagcaccatttttttcttcataaccaggattaaaattcatatatactgcagggcagacatacatatgatagcttgtgctgattaatttaaccccatttgtaaacagatgaaaattttattttcttatttcatttataagatggctcaatgtattgggaggcttcttttttattacagaaagtgtatattggtatataataaatgaacttttcaaatgacaaaaaaaaaaaaaaaa

SEQ ID NO: 57083 - DNA, 2110 bp, Homo Sapiens; identical to SEQ ID NO: 25039

SEQ ID NO: 57084 - DNA, 3363 bp, Homo Sapiens
ggctttggccctggaaagcctcgcggacgtgttctgacccaaggttttagcagtggatgtggcgttttcttccattccttctttcagtttttctgtactcgttgcttgcaattaagtgtaaatacttttgctagtggataatgggggaggcaaggactgagacctgcggtatgacgatagctctggctcttaatagtttgaggtaaagcgagatactctgagcttttgtctcccgtaaaaagggtggtgaatatgaataagggctttcttagcgttataagaattaaagggcatagttctgtggtgtgaaatctttaaaagatgttcagtaaataaaaatgattttcctccttcccctctcagacctctttttcttctttctttctttttttttgacaagttctcactcctctcacccaggctggagtctttctgaaagagttcttccgcttgttgttggctttcaactgttggatttgaggcgcttagcgccttcttcgtccgggtgcagcacattcttgattggtctcatgcctttgtggttgtaaatgtgcctggaatcctagcctttcatggtttgttctgagtaatgaataccctattactatgatactagtatcttccttaattatcctactcattgtctcaacattctgacagttggattgagcatattcaaattttgaaaattattgtagaaatgtttttacctcatatgaaccacctgacattggaacagactttcttttcacaagtgttaccaaagactgtgaaattattcgatgacatgatgtatgaattaaccagtcaagccagaggactgtcaagccaaaatttggaaatccagaccactctaaggaatattttacaaacaatggtgcagctcttaggagctctcacaggatgtgttcagcatatctgtgccacacaggaatccatcattttggaaaatattcagagtctcccctcctcagtccttcatataattaaaagcacatttgtgcattgtaagaatagtgaatctgtgtattctgggtgtttacacctagtttcagaccttctccaggctcttttcaaggaggcctattctcttcaaaagcagttaatggaactgctggacatggtttgcatggaccctttagtagatgacaatgatgatattttgaatatggtaatagttattcattctttattggatatctgctctgttatttccagtatggaccatgcatttcatgccaatacttggaagtttataattaagcagagccttaagcaccagtccataataaaaagccagttgaaacacaaagatataattactagcttgtgtgaagacattcttttctccttccattcttgtttacagttagctgagcagatgacacagtcagatgcacaggataatgctgactacagattatttcagaaaacactcaaattgtgtcgtttttttgccaactcccttttgcactacgctaaggaatttcttcctttcctctctgattcttgctgtactttgcaccaactgtatcttcagatacacagcaagtttcctccaagcctttatgctaccaggatttctaaagcacaccaagaggaaatagcaggtgctttcctagtgacactggatccacttatcagtcagctgctcacatttcagcctttcatgcaggtggttttggacagtaaattagacctgccatgtgaactgcagtttccacaatgtcttcttctggttgttgtcatggataagctgccatctcagcctaaggaagtgcaaaccctgtggtgcacagacagccaggtctcagaaacgacaaccaggatatctctactcaaagccgttttctacagttttgagcagtgttctggtgaactctctctacctgttcatttacagggattaaagagtaaggggaaagctgaggtggctgtcaccttgtatcagcatgtttgtgttcatctgtgtacatttattacttcctttcatccctcactgtttgctgaactggatgctgctctgctgaatgctgtacttagtgctaatatgatcacctctttgttagctatggatgcatggtgcttccttgctcgatatgggactgctgaactgtgtgcacaccatgtcaccatagtggctcatctgataaagtcatgccctggagaatgttatcaactcatcaacctatcaatactgttgaagcgtctctttttcttcatggcaccaccccatcagctggagtttatccagaaattttccccaaaagaagcagaaaatctgcctctgtggcaacatatttccttccaggcgttacctcctgagcttagggaacaaactgtccatgaggtcaccacagtaggcactgcagaatgcaggaaatggctgagcaggagtcgtactttgggagaactagaatctctgaacacagtactgtctgctttgcttgcagtatgtaattctgctggtgaagctttggatacaggaaaacaaactgcaattatcgaagttgtgagtcagctttgggcttttttaaacattaaacaggtagcagatcaaccttatgttcaacagacattcagccttttacttccactgttgggatttttcattcaaactctagatcctaaactgatacttcaggcagtaactttgcagacctcgctacttaaattagagcttcctgactatgttcgtttggcaatgttggattttgtatcttctttaggaaaactttttatacctgaagctatccaggacagaattctgcccaacctgtcctgtatgtttgccttactgctagctgacaggagttggctgctagaacaacataccttggaggcgtttactcagttcgctgagggaacaaatcatgaagagatagttccacagtgtctcagttctgaagaaactaagaacaaagttgtatcctttctggagaagactgggtttgtagatgaaactgaagctgccaaagtggaacgtgtgaaacaggaaaaaggtattttctgggaaccctttgctaatgtgactgtagaagaagcaaagaggtcatctttacagccttatgcaaaaagagctcgtcaggagttcccctgggaagaagagtacaggtcagcgctgcatacaatagcaggggctttggaagcaactgagtcactactccaaaagggtcctgctccagcctggctttcaatggaaatggaggcgctccaagaaaggatggataagctaaaacgttacatacatactctagggtgaaacttatcactaggcagaactgggtttgatgctttgtcaactgaaaatacttatgtctgtacattttctaacagatataaaacaaattttgtaaagttgaa

SEQ ID NO: 57085 - DNA, 4841 bp, Homo Sapiens; identical to SEQ ID NO: 31698

SEQ ID NO: 57086 - DNA, 2135 bp, Homo Sapiens; identical to SEQ ID NO: 23941

SEQ ID NO: 57087 - DNA, 2254 bp, Homo Sapiens
gcggccgtaaagagtttgtagaggcagttcgggtgcggtacgttgcattccggtaccggacgccgagagcggtttgtctccgtctctggagttgtaggcgagaggtgatcatgtccggtcgcgggaaacagggcggcaaagtgcgagcaaaggccaaatcccgctcctcccgcgcgggcctgcagttcccggtgggccgagtgcacagactgctgcgcaaagggaactacgcggagcgagtgggcgccggggcgccggtgtacctggcggcggtgttggagtaccttacggcggagatcctggagctggctggcaacgccgcgcgtgacaacaagaagaccaggataattccccgccacctgcagctcgccatccgcaacgacgaggagttaaacaagctgctgggcaaagtgaccatcgctcagggcggcgtcctgcccaacatccaggccgtgctgctgccagtttgtgagcactcaggaccaagttctgggaagataccgtcggatcgagctgagctcggggcaggaagtgtctgcggccatatttttcaaaaagtggagtaactttccgtcttggaagggtggctctgatggcacgatgtcaacttgagattcttcctagcctagtagctgctgtgctttcatgctttggatatcagatatctttatatagcacttttatgttcatattttttttttaatgaaggaaacgttcaataagtgagtcatgaggttggaaattcgttcccctgacagtcatattgcataacattgcagcgcctttagtcgtgggttacatatgcttgagcttttaaagtgatgttgtcaagtttctagcttcataatgatcctgtcttcatcatatcatattcactttgagaatcggtttgactttgctttcaaacaaaacaaaaacctcttgcttttaggggttcttacccaacaaataacctgtttgaactctcttatattctcccactagcctgaagcaatgacctcattccagtaatgtctttgggagttgcattgcctaatggcacaatattgctttaataaacatgtaaggaaagataggaccaaatatgtaagtgcagggggaaacacatttcagaccaggaatccacattgaaaagttaacactagtaatcatcttctgcccttaattgacactcctatttatttcatcctcagcaaatttcatcctggctcacagaccccacaaaaaagatcccagtacagatttcacatctttggattcatctttcctgtgagtcggaattgaagtcttccccaaaaatatatgtatatattgtatgtcttcatccttggtagcggctggcccattttcccacatggactttattttgtccccagtatttattgaacagctgtctatgccaggctctgtacaaagtgataggagtagagctgtgaatgaggccaaccagatttccactctctcggagctcactttatttttattggttcctgaagacgggacaaggaacaaatacatacgttaatatgagagatcagcttctgttagtacttgtacctctctgctgtgtgtggatgaatgatggaattacttctcccatgttgccatttttgaggtgtacaaaggtcaggccgtacacacctctgttaggaggcaaattattgggcaggttcgagatgttctgctatttactctgtggttttgtcatatgtaaaagtcataacacctgttttaaggattgagattgttcatttactgtgtgccacatattagacaataaatggaaaaaagtaccatgttcaatgggggtatgggtttatccttataggttaaattataggtaaacattaataggactttttaaaaaatgcctcattgttagaactactactcacagttaccacttggggtcagtggaacaaaatgcatatatggttttgacatttgagtctaaaatgggcataatagtttacctcatagagtttggggagaattgagtgaattaatgtgtgtgaggacactaagattcccatatagaaataggctcaatgaatagtagctgtttttatttctatgtaaagtgagtagcggtagttgatgggagctgttgaaacaggtaaacagcattctagcaatccttcgacttttgtgatagcaaaccataaaaacaattttagtggctgttttactaattaaaggacatccacaattcaatgtataacagaaaaagtaatgattaaagcttgtgaatctg

SEQ ID NO: 57088 - DNA, 2711 bp, Homo Sapiens; identical to SEQ ID NO: 29908

SEQ ID NO: 57089 - DNA, 21813 bp, Homo Sapiens; identical to SEQ ID NO: 30109

SEQ ID NO: 57090 - DNA, 3959 bp, Homo Sapiens; identical to SEQ ID NO: 30854

SEQ ID NO: 57091 - DNA, 8776 bp, Homo Sapiens; identical to SEQ ID NO: 31651

SEQ ID NO: 57092 - DNA, 1304 bp, Homo Sapiens
gactagcgggccggcgtactggcctggtccagcacctgcggggccctcgggcttggagggctgggccgggcggggaacgggcggggcgggccggaggcggcggcggctgactcgccttctctccggggctgcgaccccgaggcaaccggctgcagatgggagcccgcggagccgaggatgcgggcgggccggggcgcgacgccggcgagggagctgttccgggacgccgccttccccgccgcggactcctcgctcttctgcgacttgtctacgccgctggcccagttccgcgaggacatcacgtggaggcggccccaggagatttgtgccacaccccggctgtttccagatgacccacgggaagggcaggtgaagcaggggctgctgggggattgctggttcctgtgtgcctgcgccgcgctgcagaagagcaggcacctcctggaccaggtctcttgccctgtgcagcttcctgcagactggacttgcaaagtccagcctgtatggctggagttcccatgcctgccaatctcctgtcgactgcgagtcagctccgatacttcaccagattcagccacctgggggagctggaagtgaatctcatcttagctgagccttctgatgagactgcagccccagctgacacctggattgcagactcatgaaagacctgaaactctaccaacagccacctgggggagctggaagtgaatctcctcgtagctgagccttctgatgagactgcagccccggctgacacctggattgcagactcatgaaagacctgaaactctaccaacagccacctgggggagctggaagtgaatctcctcgtagctgagccttctgatgagactgcagccccggctgacacctggattgcagactcatgaaagaccctgagcagaggacccagtttggcagagcccgaattcctgacccacaggaactgggagataaaactctgtggttttaatcttctcattttagaggtaatttttttgtgtagcaataggtagctgacaatgcacagctaaaataatagataattaaccctaatgctagtttcattcatccatcagggtttgcaaagtagtgatattctacttctgtcttccttcattatttattagcagaaatgtatctataaaaagaagtgttccttcattaactctttggtcatgttgaggtacagtttgcataggaaaggcagggcaaatgcttgattctttcccttcctttcctcatttataaaataatgaactgttttcctggcatctttcaacaatgactaatgagttttt

SEQ ID NO: 57093 - DNA, 3767 bp, Homo Sapiens
ccacgcgtccggaacctggtaagctcctggaggtaaaactcacaaatgtgtggggacactcctatgactgggtctccttggagctggactctcagacattctgctgtattccttaatccccaaagctccagagatagatccagtagagtgtttggtggcagataactctgtaacagtggcttggagaatgccagaagaagataataagattgaccattttatactggaacataggaagactaattttgatggacttccacgtgtaaaggatgagcgatgctgggagataattgataatattaagggtactgaatatacactatcaggcttaaaatttgattcaaagtatatgaatttcagagtgcgagcttgtaacaaggctgtggctggagagtattctgatccagtgactctagagaccaaagcacttaacttcaatttggataactcctcatcccatttgaacctgaaagttgaagatacatgtgtagagtgggatcctactggaggaaaaggtcaagaaagtaaaattaaaggaaaagagaacaagggcagaagtggtacaccatccccaaaacgaacatctgtaggctccaggccaccagcagtaagaggcagtagagatcgttttactggagaatcatacacagtgctgggagacactgctattgaaagtggacaacattattgggaggtcaaggcccagaaggattgtaaatcctacagtgtgggagtagcatacaaaacgttggggaaatttgaccaattgggaaagacaaacactagttggtgtatccatgtcaacaactggctacaaaacacatttgcagcaaagcataataataaagtcaaagctttggatgttactgttcctgaaaaaataggtgtattttgtgattttgatgggggtcaactttcattctatgatgcaaattctaaacagttgctatattcctttaagacaaaatttactcagccagtactacctggtttcatggtatggtgtggtggactttctttgagtactgggatgcaggttccaagtgctgtgagaacacttcagaaaagtgaaaatggaatgactggttcagctagcagcctgaacaatgttgttactcaatagtgtctactcagaatacgtttaccctccgtcttgattaggtggccttttctgtgcagttactaatcacaggaatttggtagtagtgaaaatcaggtttgctgtgttctgctttgaggcctggaatcttttatcattaaacacctagtacgaagcatttgcaggaacctactgtgcagtatcatagaagcaagcagataccaagcaaaaaactgatgattgaagagtaaatgggggaaaaggcagtgtttaattaacataaaaactcatttttgtatttcttggattactttgactattctaatgtttaattacatatggtaaccctaaggcctggggagaaaagcttttaaatcttgccttctttcttctgtactttgtctttttaaaatctcattactatctattatttagttctaacacagaagctttaaaaatacatagtcatccaaggttttctaaaaattgaaatcatatgttgggaatggtaaaaaggttttcaaatggtttatttttcctcttttataaataagttttacaaaattttcctcttttgtttattgactagattgtatataattttcttttttccaaaatattgtgataagaaatttctagacacaacagcttaaaatcacccaaatttcagttctttacctactgcactaacaatggcaaggggggtattctttatatgttgccttgtttaactacagttcttttcattccatcactttaggtgatgggtaagatttttgaaagccttatattttttgattttgttgtctagtttaatcctacctttaatagttgtgtttggtgtttggtaaaattcccacttgaatgtgacactgataataattatgctgatttttagcatctcttataggaatcaaagtttattaaagttacatagaggattgaaaaatgtatatcactcaatttttatctaagaaggataggttataaagggaggtacctaaatactcaaataatgtatatattctttttcataacatatggaatgctttaagcaattgttttgaaaaaaatctgcgtatctttgacttaattggcacatgactttttcaagcagccattcattcagaggtttgttttctctcagtccttttgctacattcactttcttttcaaagaaatgttaattattacaaaaattgacatagatatctttcccaaacttggggtaaaacccatggttatgtggaacataactgttcttaaaaagtcaattataatttgtaactcacatcctttgagctaaactaaattaaaattacagtatttaataattctttgggcatttttaagaggtctgaatttgtatttttcttcatttttgaaactttacatttgttgacttttttttcattctcatttaaaatatattgtgctatgataaccaaccttcttccaaggagtgaccattactgcctacatttgcgttgctttctacatagagacttgtataatagtattaatagtagctcattctctctaaaaatttactgcccactgataggatgttttgtttccttgataaaacaaatgtaaatgaggaattttatttgaattggaatattgtttttctagaggacattcatatctgcactattatctgatgacatgttggtaattttaaagactgcaaggcagtttagagaatgaagtaaaccaatagatactcttttgattctccaaagaaatataattttggtttttgttcctcagagagagtttgaaagaaattttcagatgttctgttccctatagagggcctattccaggatctaaatgaatgggaatttataattcctttcatagactcaaacctgaaagcagaaatttttagtagttgagttgctttaagtgaattttaacaaatatgacacagaaaaggtcagatgctgttgtataaaattttttactagtgtgtcttatataattctttcttctcattaattcagtgcctttttcctctaagcatactcttggtccatgccccatgcagtgtcaactgatgtttaagctacagagcattgttgtagtggtgagggccctctgttgcaggggcatggggaaatgcatatattaatcaggggctggaggagtatacatgattcttgtgttcatgttgtcatttgaaactcttcacataaaattttctaatattcatttggaaaacctctccactggagaggtttcatctctgagaggttttgtaataatagtgtaagttcagtaaatccagtccaaattctcatcacatgtattatttgatactaaattttcaattattacttcaaaataagagtctgaggatttcttcttactggcgttcttaaaggtctctaaaattaaagaacaagatgtggttttttgtttaagacgtttttagtttatttgttgttaagttaaactggagaaagtttgtcatcctcattttcaaactgaaaactaatcaaatatagtgcctatttagtctcaaaataaggtaactattaacttgattatactatataatattctcaattacatttgaatttaaaaatattgagctcttgattacaatttaatacattgtaaaaagtattaaatcctttgaaacatcaaaaaaaaaaaaaaa

SEQ ID NO: 57094 - DNA, 3767 bp, Homo Sapiens
cctctcaccctttagcccagaactgctttgaatacaccaattgctgtggggcggctcgaggaagagaagacaccagtgcctcagaaactgctcggtcagacggtgatagcgagccacgcattcacagggccactgctgctcacagaagcagtgaggatgatgccaggatgatgtctgcctcgcgcctggctgggactctgatcccagccatggccttcctctcctgcgtgagaccagaaagctgggagccctgcgtggagacttggccctaaaccacacagaagagctggcatgaaacccagagctttcagactccggagcctcagcccttcaccccgattccattgcttcttgctaaatgctgccgttttatcacggaggtgtgaaatccagacaattgaagatggggcatatcagagcctaagccacctctctaccttaatattgacaggaaaccccatccagagtttagccctgggagccttttctggactatcaagtttacagaagctggtggctgtggagacaaatctagcatctctagagaacttccccattggacatctcaaaactttgaaagaacttaatgtggctcacaatcttatccaatctttcaaattacctgagtatttttctaatctgaccaatctagagcacttggacctttccagcaacaagattcaaagtatttattgcacagacttgcgggttctacatcaaatgcccctactcaatctctctttagacctgtccctgaaccctatgaactttatccaaccaggtgcatttaaagaaattaggcttcataagctgactttaagaaataattttgatagtttaaatgtaatgaaaacttgtattcaaggtctggctggtttagaagtccatcgtttggttctgggagaatttagaaatgaaggaaacttggaaaagtttgacaaatctgctctagagggcctgtgcaatttgaccattgaagaattccgattagcatacttagactactacctcgatgatattattgacttatttaattgtttgacaaatgtttcttcattttccctggtgagtgtgactattgaaagggtaaaagacttttcttataatttcggatggcaacatttagaattagttaactgtaaatttggacagtttcccacattgaaactcaaatctctcaaaaggcttactttcacttccaacaaaggtgggaatgctttttcagaagttgatctaccaagccttgagtttctagatctcagtagaaatggcttgagtttcaaaggttgctgttctcaaagtgattttgggacaaccagcctaaagtatttagatctgagcttcaatggtgttattaccatgagttcaaacttcttgggcttagaacaactagaacatctggatttccagcattccaatttgaaacaaatgagtgagttttcagtattcctatcactcagaaacctcatttaccttgacatttctcatactcacaccagagttgctttcaatggcatcttcaatggcttgtccagtctcgaagtcttgaaaatggctggcaattctttccaggaaaacttccttccagatatcttcacagagctgagaaacttgaccttcctggacctctctcagtgtcaactggagcagttgtctccaacagcatttaactcactctccagtcttcaggtactaaatatgagccacaacaacttcttttcattggatacgtttccttataagtgtctgaactccctccaggttcttgattacagtctcaatcacataatgacttccaaaaaacaggaactacagcattttccaagtagtctagctttcttaaatcttactcagaatgactttgcttgtacttgtgaacaccagagtttcctgcaatggatcaaggaccagaggcagctcttggtggaagttgaacgaatggaatgtgcaacaccttcagataagcagggcatgcctgtgctgagtttgaatatcacctgtcagatgaataagaccatcattggtgtgtcggtcctcagtgtgcttgtagtatctgttgtagcagttctggtctataagttctattttcacctgatgcttcttgctggctgcataaagtatggtagaggtgaaaacatctatgatgcctttgttatctactcaagccaggatgaggactgggtaaggaatgagctagtaaagaatttagaagaaggggtgcctccatttcagctctgccttcactacagagactttattcccggtgtggccattgctgccaacatcatccatgaaggtttccataaaagccgaaaggtgattgttgtggtgtcccagcacttcatccagagccgctggtgtatctttgaatatgagattgctcagacctggcagtttctgagcagtcgtgctggtatcatcttcattgtcctgcagaaggtggagaagaccctgctcaggcagcaggtggagctgtaccgccttctcagcaggaacacttacctggagtgggaggacagtgtcctggggcggcacatcttctggagacgactcagaaaagccctgctggatggtaaatcatggaatccagaaggaacagtgggtacaggatgcaattggcaggaagcaacatctatctgaagaggaaaaataaaaacctcctgaggcatttcttgcccagctgggtccaacacttgttcagttaataagtattaaatgctgccacatgtcaggccttatgctaagggtgagtaattccatggtgcactagatatgcagggctgctaatctcaaggagcttccagtgcagagggaataaatgctagactaaaatacagagtcttccaggtgggcatttcaaccaactcagtcaaggaacccatgacaaagaaagtcatttcaactcttacctcatcaagttgaataaagacagagaaaacagaaagagacattgttcttttcctgagtcttttgaatggaaattgtattatgttatagccatcataaaaccattttggtagttttgactgaactgggtgttcactttttcctttttgattgaatacaatttaaattctacttgatgactgcagtcgtcaaggggctcctgatgcaagatgccccttccattttaagtctgtctccttacagaggttaaagtctagtggctaattcctaaggaaacctgattaacacatgctcacaaccatcctggtcattctcgagcatgttctattttttaactaatcacccctgatatatttttatttttatatatccagttttcatttttttacgtcttgcctataagctaatatcataaataaggttgtttaagacgtgcttcaaatatccatattaaccactatttttcaaggaagtatggaaaagtacactctgtcactttgtcactcgatgtcattccaaagttattgcctactaagtaatgactgtcatgaaagcagcattgaaataatttgtttaaagggggcactcttttaaacgggaagaaaatttccgcttcctggtcttatcatggacaatttgggctagaggcaggaaggaagtgggatgacctcaggaggtcaccttttcttgattccagaaacatatgggctgataaacccggggtgacctcatgaaatgagttgcagcagaagtttatttttttcagaacaagtgatgtttgatggacctctgaatctctttagggagacacagatggctgggatccctcccctgtacccttctcactgccaggagaacta

SEQ ID NO: 57095 - DNA, 2811 bp, Homo Sapiens; identical to SEQ ID NO: 30758

SEQ ID NO: 57096 - DNA, 2011 bp, Homo Sapiens
ggaaaagggaaggaggagactgagtgattaagtcacccactgtgagagctggtcttctatttaatgggggctctctctgcccaggagtcagaggtgcctccaggagcagcaggagcatggccgaggatctgggactgagctttggggaaacagccagtgtggaaatgctgccagagcacggcagctgcaggcccaaggccaggagcagcagcgcacgctgggctctcacctgctgcctggtgttgctccccttccttgcaggactcaccacatacctgcttgtcagccagctccgggcccagggagaggcctgtgtgcagttccaggctctaaaaggacaggagtttgcaccttcacatcagcaagtttatgcacctcttagagcagacggagataagccaagggcacacctgacagttgtgagacaaactcccacacagcactttaaaaatcagttcccagctctgcactgggaacatgaactaggcctggccttcaccaagaaccgaatgaactataccaacaaattcctgctgatcccagagtcgggagactacttcatttactcccaggtcacattccgtgggatgacctctgagtgcagtgaaatcagacaagcaggccgaccaaacaagccagactccatcactgtggtcatcaccaaggtaacagacagctaccctgagccaacccagctcctcatggggaccaagtctgtatgcgaagtaggtagcaactggttccagcccatctacctcggagccatgttctccttgcaagaaggggacaagctaatggtgaacgtcagtgacatctctttggtggattacacaaaagaagataaaaccttctttggagccttcttactataggaggagagcaaatatcattatatgaaagtcctctgccaccgagttcctaattttctttgttcaaatgtaattataaccaggggttttcttggggccgggagtagggggcattccacagggacaacggtttagctatgaaatttggggcccaaaatttcacacttcatgtgccttactgatgagagtactaactggaaaaaggctgaagagagcaaatatattattaagatgggttggaggattggcgagtttctaaatattaagacactgatcactaaatgaatggatgatctactcgggtcaggattgaaagagaaatatttcaacaccttcctgctatacaatggtcaccagtggtccagttattgttcaatttgatcataaatttgcttcaattcaggagctttgaaggaagtccaaggaaagctctagaaaacagtataaactttcagaggcaaaatccttcaccaatttttccacatactttcatgccttgcctaaaaaaaatgaaaagagagttggtatgtctcatgaatgttcacacagaaggagttggttttcatgtcatctacagcatatgagaaaagctacctttcttttgattatgtacacagatatctaaataaggaagtatgagtttcacatgtatatcaaaaatacaacagttgcttgtattcagtagagttttcttgcccacctattttgtgctgggttctaccttaacccagaagacactatgaaaaacaagacagactccactcaaaatttatatgaacaccactagatacttcctgatcaaacatcagtcaacatactctaaagaataactccaagtcttggccaggcgcagtggctcacacctgtaatcccaacactttgggaggccaaggtgggtggatcatctaaggccgggagttcaagaccagcctgaccaacgtggagaaaccccatctctactaaaaatacaaaattagccgggcgtggtagcgcatggctgtaatcctggctactcaggaggccgaggcagaagaattgcttgaactggggaggcagaggttgcggtgagcccagatcgcgccattgcactccagcctgggtaacaagagcaaaactctgtccaaaaaaaaaaaaaaaaaaaa

SEQ ID NO: 57097 - DNA, 1859 bp, Homo Sapiens
actcttttttttttttaagacagtctggctctgtagcccaggctggagtgcagtggcgcgatctcggctcactgcaacctccgcctcccgggttcaagcagttctgcctcagcctcccgaagggcgccaccatgcctggctaatttttgcatttttagtagagacagggtttcgccatgttggccaggctggtctcgaactcctgacctcaagctatctgcccgcctcggcctcccagagtgccgagattacaggcgtgagccaccgcgcccggcctacccttgaagaccccgcagccaaggtcctccggccccgctctgcgcggcgctctggtcttggggctccggactctgtcatgccgggcaggggccagtccgatccttgcacccttgcctggcaccgtccctggagccttggcgtcctggcctctcctccccgcgggctggaggtggagtggccgggccggaaccagtgcgcaaagcagatggcgagcgcggaggtcggttcggccccgccgcgcctcaaggcagcagccaccctggggaaggtggatgccggaagaggcgtcgcctgcgggtcacccagaggacacccggcggggaattccgagggtgggagtgaggagagagcgaccgcgcggtgtctcagagcgcggcccggagccgcactaagagcgctggacggcgggagagaggctcggaggaccggtagctcccagcaaagcggcccagcggatgtcgggagctatcttcgggcccctggagggcccgagctccctggatgccccgagcatccacccgctggtgtgcccgctgtgccacgtgcagtacgagcgcccgtgtcttctggactgtttccacgacttctgtgccggctgcctgcgtggccgcgcgaccgacggccgcctcacctgcccgctgtgccaacaccagacggtgctgaagggtcccagcgggctcccgccggtggaccggctgctgcagttcctggtggacagctcaggggatggcgtggaggcggtgcgctgtgccaactgtgacctggagtgcagcgagcaggcaggggcggcagggcgggtgggtgaggagcagagggtacccggttgcacagtccccaatgcttgcacatgcactcagcatgtcttcagaggacgacctggcagtggattctccagcacctccctagggcaccttggccccaaatgtgaaccccattataccggtggggagactgaggtccagaacaagggacttgagccagtgtccagacagtggcagaggctaaggccattcgatctggggagagctcactggtccccaattcagggtggagttgtggacctgcacaggaggggcagtccagtttgcaggcctgggccgaccctgaagggcctctgctacccaagtggcatagaagcagctacagcccaggggaggtggggacagcatgctgttccctctgggctgtaaaaggcacaggggactctggcctgcggaggccagaaaatgtatcgggaatcccaggaggacggcccgactggggcaaaagctccagcgttctggacaagtgctgagcaatgtgtgacccagacgtacagagaggattagcaggaggtagggactgcaggtagggcctgttatgtccatcattgcatgcgtccataccagggctgcaggccaagccctggaatcccagccctgggtcaggcttggggaggagaaccttaaggccctcactgctcttcccctccccccgcccccaagtgtgactccagatggccagggtgtacaccacctttcggccactattgagtgtgccaagggggccgtgagaggccctcacacccttttgttaaaagt

SEQ ID NO: 57098 - DNA, 2662 bp, Homo Sapiens
aagtaggcggagaaagcagaggaggaccggcgggccaagctttcctagcctgacagcagccatttcggaacgtacgtcccagccctctttagctacttagcgcctctgggcccgagaacacctgctccttggctcagtctggcgccaccggcatcacggaactgtacttcccagagacgtcacaccgggagacttccgattcccgctcttgagattggactctcacgtgcaggagccagtcctcgctgggctctagcgggcttctgatggaggagctactcctctgggaggacagaaattagcagcagcctctgtcaccatccaaagattacaacccatgaaaccattgaatttgtgccttgtatcagaaagcaaaggagaatgaaaaagcacagctaacattgcttgaggatctaggcgattaattctttagactgtcatcatgggtatccgaggactaatgagttttgtggaagatcatagtaatgaattcttcactgatttgaagttgcgggacacaaaaattgtcattgatggttatgctcttttccaccgtctttgcttcagttcaaacttggatctccggtatggaggggactatgattcttttgcagatgttgtacaaaaattctttgaatcactgtttgcttgtaatatatgcccatatgttgtattagatggaggatgtgacatttcagataaaaagcttacaactttaaaggatagagctagagagaagatccagatggcccattccctttctgttggtgggagtgggtacgtatgtcccttactcatccgggaagtattcatacaggttttgatcaagctgcgggtgtgttttgtccagtgcttttcagaagcagatcgggacattatgacacttgctaaccattggaattgccctgtgttatcatcagatagtgacttttgcatttttgacctgaaaactgggttttgcccattgaatagctttcagtggagaaatatgaacactattaagggcacacaaaactatatccctgccaaatgcttttcccttgatgcattctgccatcacttcagcaatatgaataaagctctactacctctctttgcggtgctatgtggaaatgaccatgttaatctacccatcatggagacattcttaagtaaagcgcgtcttcctcttggagctaccagttctaaagggaggagacaccaccgaatcctgggacttctgaattggttgtctcattttgccaaccctaccgaagcactagataatgttctgaaatacctcccaaaaaaggatcgagaaaatgttaaggaacttctctgctgttccatggaagaataccaacagtcccaggtgaagctacaggacttcttccagtgtggtacttatgtctgtccagatgccttgaatcttggtttaccagaatgggtattagtggctttagctaaaggccagctatctcctttcatcagtgatgctttggtcctaagacggaccattcttcccacacaggtggaaaacatgcagcaaccaaatgcccacagaatatctcagcccatcaggcaaatcatctatgggcttcttttaaatgcctcaccacatctggacaagacatcctggaatgcattgcctcctcagcctctagctttcagtgaagtggaaaggattaataaaaatatcagaacctcaatcattgatgcagtagaactggccaaggatcattctgacttaagcagattgactgagctctccttgaggaggcggcagatgcttctgttagaaaccctgaaggtgaaacagaccattctggagccaatccctacttcactgaagttgcccattgctgtcagttgctactggttgcagcacaccgagaccaaagcaaagctacatcatctacaatccttactgctcacaatgctagtggggcccttgattgccataatcaacagccctggtaaggaagagctgcaggaagatggtgctaagatgttgtatgcagagttccaaagagtgaaggcgcagacacggctgggcacaagactggacttagacacagctcacatcttctgtcagtggcagtcctgtctccagatggggatgtatctcaaccagctgctgtccactcctctcccagagccagacctaactcgactgtacagtggaagcctggtgcacggactatgccagcaactgctagcatcgacctctgtagaaagtctcctgagcatatgtcctgaggctaagcaactttatgaatatctattcaatgccacaaggtcatatgcccccgctgaaatattcctaccaaaaggtagatcaaattcaaaaaaaaaaaggcagaagaaacagaataccagctgttctaagaacagagggagaaccactgcacacaccaagtgttggtatgagggaaacaaccggtttgggttgttaatggttgaaaacttagaggaacatagtgaggcctccaacattgaataaaactcagtttgcatcaaactagatgtatttaatataatccttacttaaaattcttccgttaccacccttgaaacaattagctttttctttaggactgacctgttaggggataaacatcacaataatctgaattccaagttattttgtattttgtttttaataaatacaacctgatttaag

SEQ ID NO: 57099 - DNA, 1560 bp, Homo Sapiens
tctagtaaaaatgcatttttatagagatgttgggaaaggcttcttgaaattacacgtgggacttttaatagataggcgctttgaccagctaagcaacagggctcccctcgtgtgggacttttagaatgtagcaaccactgacacgcagggaaggattatgcgatcaggtgagaaggtggccgaccctgactggctggaagcagatgcattctggtagttgattggtccacaggtagcgtgacgcttgtcacgtcctcagcctcccagcattcaatcgtagcctttcggacagctcgaagcccttctgtggagagctcgaagccttctgtggagaactcaaagccgtccgtggagccccagacgagccaaagcccaccttctcctcagcctgagctgtcttgaagatgagtaagagtgggtttgggagctatggcagcatttctgctgctgatggagcgagtggaggcagtgaccaactgtgtgagagagatgcaactcctgctattaagacccaaagacctaaggtccgaattcaggacgttgtaccgtgtaacgtgaaccagcttctcagctctactgtgtttgaccctgtgttcaaggttaggggaattatagtttcccaggtctccatcgtgggggtaatcagaggggcagagaaggcttcaaatcacatttgttacaaaattgatgatatgaccgcgaaaccaatcgaggcccgacagtggtttggtagagagaaagtcaagcaggtgactccattgtcagtcggagtatatgtcaaagtgtttggtatcctcaaatgtcccacgggaacaaagagccttgaggtattgaaaattcatgtcctagaggacatgaacgagttcaccgtgcatattctggaaacggtcaatgcacacatgatgctggataaagcccgtcgtgataccactgtagaaagtgtgcctgtgtctccatcagaagtgaatgatgctggggataacgatgagagtcaccgcaatttcatccaggacgaagtgctgcgtttgattcatgagtgtcctcatcaggaagggaagagcatccatgagctccgggctcagctctgcgaccttagcgtcaaggccatcaaggaagcgattgattatctgaccgttgagggccacatctatcccactgtggatcgggagcattttaagtctgctgattgaggcagggaaaacatcctttcatttttcgaagacccttgcatccagctgtgagtaattttgacctgttgactttttaggagtaggactaaaaaaaaaaatctcaagtggcattctttgtcaactcgctgcttttctaactgctttgaacttttcggattttctgtatttgaagctcagagagagacggtgatggataaattgacaactctgtaggatttactagcaagctaatggaaacatgattttcggggaagaaaaactacagaaaatgtagaaatttattatttaattgtgttggagcttctttttccaaaagaaaaactagttgcagtcagggagccagcgaaaagacaaaaaaaaaaaaaaaaaa

SEQ ID NO: 57100 - DNA, 2170 bp, Homo Sapiens; identical to SEQ ID NO: 23250

SEQ ID NO: 57101 - DNA, 2630 bp, Homo Sapiens; identical to SEQ ID NO: 30772

SEQ ID NO: 57102 - DNA, 2145 bp, Homo Sapiens
aataaatggagtttcaaaatcacaagcttctttcccacatgaacataagactaggagcacatatggaagagtaaagttgaagggaatttggatgatgatttggcaagatgctgtaagtggattaggcaaggctgctaaagagagacaggaaatggctgtgttagtgcttcggacctccgttagaagtagcagttcatggtgttgaaggtttgttgttgaaaataccttcctgaggcacctcttcattgtgcttattcttcccacaacattgtgccaagacactgtcaagcctgggcctgtcaaagcctgggatgtcaaaggcctgggtctttctcatcctgctgtaatgtattgatagctgggggctctgcagaaggacaagggaaaggtgggatagtaacatctttttgagggaagaattggcttcctttcttgaaagtggtgaaggtacagcatatagctgcatggaagaaacagtaatcggatggctaccttctacattttgtattaggaaacaaagtccattgtaagagtccatgttgatcttggaaatagaaggattgaaaaaagctaaatttccacaaagaacaagaacttgaccatctcctttttgatctgaagactaggggacaatggatatcatagagacagcaaaacttgaagaacatttggaaaatcaacccagtgatcctacgaacacttatgcaagacccgctgaacctgttgaagaagaaaacaaaaatggcaatggtaaacccaagagcttatccagtgggctgcgaaaaggcaccaaaaagtacccggactatatccaaattgctatgcccactgaatcaaggaacaaatttccactagagtggtggaaaacgggcattgccttcatatatgcagttttcaacctcgtcttgacaaccgtcatgatcacagttgtacatgagagggtccctcccaaggagcttagccctccactcccagacaagttttttgattacattgatagggtgaaatgggcattttctgtatcagaaataaatgggattatattagttggattatggatcacccagtggctgtttctgagatacaagtcaatagtgggacgcagattctgttttattattggaactttatacctgtatcgctgcattacaatgtatgttactactctacctgtgcctggaatgcatttccagtgtgctccaaagctcaatggagactctcaggcaaaagttcaacggattctacgattgatttctggtggtggattgtccataactggatcacatatcttatgtggagacttcctcttcagcggtcacacggttacgctgacactgacttatttgttcatcaaagaatattcgcctcgtcacttctggtggtatcatttaatctgctggctgctgagtgctgccgggatcatctgcattcttgtagcacacgaacactacactatcgatgtgatcattgcttattatatcacaacacgactgttttggtggtaccattcaatggccaatgaaaagaacttgaaggtctcttcacagactaatttcttatctcgagcatggtggttccccatcttttatttttttgagaaaaatgtacaaggctcaattccttgctgcttctcctggccgctgtcttggcctcctggctgcttcaaatcatcatgcaaaaagtattcacgggttcagaagattggtgaagacaatgagaaatcgacctgaggagcaaaacaaaggcatcagctcttacaccaaaagagttaacgctgtaaccaaaggtatagttttgttttttattttaggagaactgactggtaaatgaagaaatggaccaaattttgtgtaaacgattagaaagatgaacaaagtattgccctttgactggttttcttcttcatcctgagaaagatacattctcttgcagctcttcattcattggtgacaagcccccaccccgggactttactaatgagcttgttaaagaggtgccaaagaacatattcctcctttctttattctttctccaccaaaaccctctacttcagaattttttcaggatatttttcagcccaaggtcagaagaatgtgttaatattttaaataaaatatctggacatctacaaaaaaaaaaaaaaaa

SEQ ID NO: 57103 - DNA, 2151 bp, Homo Sapiens
gctttccttttagcttttgtaagttacacgtcaaaatggccgatctgacatcggtgctcacttctgttatgttttctccctctagtaaaatgtttatcggtggactgagctggcagacctcaccagatagccttagagactattttagcaaatttggagaaattagagaatgtatggtcatgagagatcccactacgaaacgctccagaggcttcggtttcgtcacgttcgcagacccagcaagtgtagataaagtattaggtcagccccaccatgagttagattccaagacgattgaccccaaagttgcatttcctcgtcgagcgcaacccaagatggtcacaagaacaaagaaaatatttgtaggcgggttatctgcgaacacagtagtggaagatgtaaagcaatatttcgagcagtttggcaaggtggaagatgcaatgctgatgtttgataaaactaccaacaggcacagagggtttggctttgtcacttttgagaatgaagatgttgtggagaaagtctgtgagattcatttccatgaaatcaataataaaatggtagaatgtaagaaagctcagccgaaagaagtcatgttcccacctgggacaagaggccgggcccggggactgccttacaccatggacgcgttcatgcttggcatggggatgctgggatatcccaacttcgtggcgacctatggccgtggctaccccggatttgctccaagctatggctatcagttcccagactatttgccggtttcacaagacataatttttatcaactagctcttaagagaggcatagcaaagtgggggttgctaccatttctagagagagaggacacagtcccggcctgggctgcccccgctccagtcaatgctcactgaaagtctgtcttagctgcctgtttgaatgactgttctttttctcatttttaattcttggactcatgtcctcattgcttcactcaattaaaaaaaaattattctccagtcccctcccactttgcttcttgtatgcattgtgaccgaccccacttcctcagaatgtaacggggccagagggaaacttctcacaaacttcgtagagcctcctcaggggaagctaggaagaagacatcaaatgtttttaagtcatgaccaaacaggcttgttggggacatatcatggggtgagctttgaagtgctggtggtccagaggggttgcagatacgtgacttggagcacccgtgtcttacgatggacagtgataaaggtgaacacacagagacagactattctctaagaatgtgagaaacctgatctggaagaggagctatataaacactatctgactatctttgtcttttggggccagtggctgttggcataatcacaagcctgtctgtcttcgagaagggacagtggagtcatccaggtgctgccacatgacaggcacggtgggcaccgatccacagtgggccccgccttccccagctcgcctccctgcctgtgctggcctggccttgcctgctggcaccattggagtaggagggggtggaacacagggggcccatcctgatcaggccccatctcaaggttggcactcctgcccatcacccttagaaggatcttttcccatggcttgacttccttcatttccctaactgaaatacacccactctcttggaataatgacgtaccactcagttggaccctcaagagtcactgctttgtctgtgctggtagtttgtgagaagtgacccgcacgcttccatttgatgcatttgatgtgagtgaatccatacatttgaatgtcattgtccttgagaccctacatgtgcagtttggctcatctcattaaagatgcttgatgtaataattggttagtttccttttattttcctgcaggcttttccatgagtattatttttttcaaagaacaaatctgtatggcttttccccatctccatattttgttttgctatgaattgctttgctttggtgaacttgtcctagtatgcttgcctcacaaacgttttagccattgtgaattttcttcatctctgtaaatagttcatctgtgcttctccctgatgacgttttattttttttcccctgtaagcaaccgaggtagaaaaataaattgtttaccatggaaaaaaaaa

SEQ ID NO: 57104 - DNA, 10310 bp, Homo Sapiens; identical to SEQ ID NO: 30834
  misc_feature (5161)..(5161): n is a, c, g, or t

SEQ ID NO: 57105 - DNA, 4166 bp, Homo Sapiens
caggtggaatgtcagaagactgagaacattgttccttcttcatactgctgctctgttgccagagaatcccaatttacactcaaagcttctttgattaagtgctaggagataaatttgcattttctcaaggaaaaggctaaaagtggtagcaggtggcatttaccgtcatggagagcagggatcataacaacccccaggagggacccacgtcctccagcggtagaagggctgcagtggaagacaatcacttgctgattaaagctgttcaaaacgaagatgttgacctggtccagcaattgctggaaggtggagccaatgttaatttccaggaagaggaagggggctggacacctctgcataacgcagtacaaatgagcagggaggacattgtggaacttctgcttcgtcatggtgctgaccctgttctgaggaagaagaatggggccacgccttttatcctcgcagcgattgcggggagcgtgaagctgctgaaacttttcctttctaaaggagcagatgtcaatgagtgtgatttttatggcttcacagccttcatggaagccgctgtgtatggtaaggtcaaagccctaaaattcctttataagagaggagcaaatgtgaatttgaggcgaaagacaaaggaggatcaagagcggctgaggaaaggaggggccacagctctcatggacgctgctgaaaaaggacacgtagaggtcttgaagattctccttgatgagatgggggcagatgtaaacgcctgtgacaatatgggcagaaatgccttgatccatgctctcctgagctctgacgatagtgatgtggaggctattacgcatctgctgctggaccatggggctgatgtcaatgtgaggggagaaagagggaagactcccctgatcctggcagtggagaagaagcacttgggtttggtgcagaggcttctggagcaagagcacatagagattaatgacacagacagtgatggcaaaacagcactgctgcttgctgttgaactcaaactgaagaaaatcgccgagttgctgtgcaaacgtggagccagtacagattgtggggatcttgttatgacagcgaggcggaattatgaccattcccttgtgaaggttcttctctctcatggagccaaagaagattttcaccctcctgctgaagactggaagcctcagagctcacactggggggcagccctgaaggatctccacagaatataccgccctatgattggcaaactcaagttctttattgatgaaaaatacaaaattgctgatacttcagaaggaggcatctacctggggttctatgagaagcaagaagtagctgtgaagacgttctgtgagggcagcccacgtgcacagcgggaagtctcttgtctgcaaagcagccgagagaacagtcacttggtgacattctatgggagtgagagccacaggggccacttgtttgtgtgtgtcaccctctgtgagcagactctggaagcgtgtttggatgtgcacagaggggaagatgtggaaaatgaggaagatgaatttgcccgaaatgtcctgtcatctatatttaaggctgttcaagaactacacttgtcctgtggatacacccaccaggatctgcaaccacaaaacatcttaatagattctaagaaagctgctcacctggcagattttgataagagcatcaagtgggctggagatccacaggaagtcaagagagatctagaggaccttggacggctggtcctctatgtggtaaagaagggaagcatctcatttgaggatctgaaagctcaaagtaatgaagaggtggttcaactttctccagatgaggaaactaaggacctcattcatcgtctcttccatcctggggaacatgtgagggactgtctgagtgacctgctgggtcatcccttcttttggacttgggagagccgctataggacgcttcggaatgtgggaaatgaatccgacatcaaaacacgaaaatctgaaagtgagatcctcagactactgcaacctgggccttctgaacattccaaaagttttgacaagtggacgactaagattaatgaatgtgttatgaaaaaaatgaataagttttatgaaaaaagaggcaatttctaccagaacactgtgggtgatctgctaaagttcatccggaatttgggagaacacattgatgaagaaaagcataaaaagatgaaattaaaaattggagacccttccctgtattttcagaagacatttccagatctggtgatctatgtctacacaaaactacagaacacagaatatagaaagcatttcccccaaacccacagtccaaacaagcctcagtgtgatggagctggtggggccagtgggttggccagccctgggtgctgatggactgatttgctggagttcagggaactacttattagctgtagagtccttggcaaatcacaacattctgggccttttaactcaccaggttgcttgtgagggatgagttgcatagctgatatgtcagtccctggcatcgtgtattccatatgtctataacaaaagcaatatatacccagactacactagtccataagctttacccactaactgggaggacattctgctaagattccttttgtcaattgcaccaaaagaatgagtgccttgacccctaatgctgcatatgttacaattctctcacttaattttcccaatgatcttgcaaaacagggattatcatccccatttaagaactgaggaacctgagactcagagagtgtgagctactggcccaagattattcaatttatacctagcactttataaatttatgtggtgttattggtacctctcatttgggcaccttaaaacttaactatccttccagggctcttccagatgaggcccaaaacatatataggggttccaggaatctcattcattcattcagtatttattgagcatctagtataagtctgggcactggatgcatgaattccactccttccagaaccaactgcattggttttccatgaccttaaggcagtagttctcaactggggggcaattttgcactgaagagagcatttggcagagtctgaagaagtttttggtgtcacagctttgtggggagcatgctatggcatttagtgggtaaagaccagggatgctgccaaacctgccttgcacaggacagcccctgcaacaaagaattatccagacaaaaatatcaatggtgctgaggttgagaaaacctgacttaaggggctgggatgcttttgaactagcttaaggcccaggactgtggagtgtgtggaccaccccacagaggagggactcagatttatttactcttgctggatctgtagtgatggagttccttctggtgtcagccccacaggaggctcccaggcctccctcacttcccatacccagtctaggagctccttctggctcccaagcacccagagctttcctccgccttttagttttggttcctccactggaatgtaggctcctcacgggcgatggctgtcttttcttgactttgtatcttcactgccaagcaaaaagtctgccaagtgggaatgtttaataaatattcattgaataatgaatgaaccatcttcgtacatgaataataatactgtcttacgtttttctggtgctttataatgtatacattacatctgagtattttattttatttaattttcaaaacaatcctttaaggtcaacattgttatccctattttgctgatgaggaaactaaggttagaaacattttgatttcctctaggacgtatagctaggaagtgttactatcttgatttgaacaaattttctggtgctaagtctgatgttctttccatgaatcattgtggtggttgagatggagctttgtaatgggaataaaacagtaccttaggttctttctgaaaaggaggtatctagcaatggataaatagataccactgaatgaaattaaatgttgattaggaacaaatttaaggcttaaaaaatactttatgagcagcaagattgctttaacttttaaaatgaagctttggttctctgatttgtaatgagcacctggacatgtcaattaaaatgcccatttgtgaagcttactcaataaaactttaaattgtcaaaaaaaaaaaaaaaaaa

SEQ ID NO: 57106 - DNA, 1077 bp, Homo Sapiens
gctgggggaagaggcgtggcggcgctgtgcgcgtgcacaaaagagagctgaggggcgggggcgctgcggcacagctggtttgagcaactgaactggaaacaagatgcaggaccccaacgcagacactgaatggaatgacatcttacgcaaaaagggtatcttaccccccaaggaaagtctgaaagaattggaagaggaggcagaagaggagcagcgcatcctccagcagtcagtggtgaaaacatatgaagatatgactttggaagagctggaggatcatgaagacgagtttaatgaggaggatgaacgtgctattgaaatgtacagacggcggagactggctgagtggaaagcaactaaactgaagaataaattcggagaagttttggagatctcagggaaggattatgttcaagaagttaccaaagctggcgagggcttgtgggtcatcttgcacctttacaaacaaggaattcccctctgtgccctgataaatcagcacctcagtggacttgccaggaagtttcctgatgtcaaatttatcaaagccatttcaacaacctgcatacccaattatcctgataggaatctgcccacgatatttgtttacctggaaggagatatcaaggctcagtttattggtcctctggtgtttggcggcatgaacctgacaagagatgagttggaatggaaactgtctgaatctggagcaattatgacagacctggaggaaaaccctaagaagccgattgaagacgtgttgctgtcctcagtgcggcgctctgtcctcatgaagagggacagcgattccgagggtgactgaggctacagcttctatcacatgccgaactttcttgtgacaaattgtctggattttttaaaaaaggaaaaagcaagaatgaatccttgtggtttttagttttgtataaattatgtttcaaatctttacattttggaaataatcattgctggagattctgttaaatattttggaactctttttttttttaaattatagtatttcctctaaaaaaaattaaaaccagccatttgtatggcaaatgtcaaaaaaaaaaa

SEQ ID NO: 57107 - DNA, 1065 bp, Homo Sapiens
atgtcccgcctgctgcatgcagaagagtgggctgaagtgaaggagttgggagaccaccatcgccagccccagccgcatcatctcccgcaaccgccgccgccgccgcagccacctgcaactttgcaggcgagagagcatcccgtctacccgcctgagctgtccctcctggacagcaccgacccacgcgcctggctggctcccactttgcagggcatctgcacggcacgcgccgcccagtatttgctacattccccggagctgggtgcctcagaggccgctgcgccccgggacgaggtggacggccggggggagctggtaaggaggagcagcggcggtgccagcagcagcaagagccccgggccggtgaaagtgcgggaacagctgtgcaagctgaaaggcggggtggtggtagacgagctgggctgcagccgccaacgggccccttccagcaaacaggtgaatggggtgcagaagcagagacggctagcagccaacgccagggagcggcgcaggatgcatgggctgaaccacgccttcgaccagctgcgcaatgttatcccgtcgttcaacaacgacaagaagctgtccaaatatgagaccctgcagatggcccaaatctacatcaacgccttgtccgagctgctacaaacgcccagcggaggggaacagccaccgccgcctccagcctcctgcaaaagcgaccaccaccaccttcgcaccgcggcctcctatgaagggggcgcgggcaacgcgaccgcagctggggctcagcaggcttccggagggagccagcggccgaccccgcccgggagttgccggactcgcttctcagccccagcttctgcgggagggtactcggtgcagctggacgctctgcacttctcgactttcgaggacagcgccctgacagcgatgatggcgcaaaagaatttgtctccttctctccccgggagcatcttgcagccagtgcaggaggaaaacagcaaaacttcgcctcggtcccacagaagcgacggggaattttccccccattcccattacagtgactcggatgaggcaagttag

SEQ ID NO: 57108 - DNA, 680 bp, Homo Sapiens
ctctgccagtctgcacgtgggtgagccggatggggcagtgccgtgtgctgtgacggggctggggctgagctttctgggggcgcctggcatcgccggccccgggtgcgggtcctgttagggacctatcccctgccccatggggggccttggactgggcatggggtccctgctgcacgcctggcctcaggcgccccctccccagccccagcagccactcctgggcctgtcctgggatgtgtgccctgaagcccctccccaccagcccccaccccgccccccatgcaccaccctccccagggctctctccgcagaccacagtgagctgcagggcaaggcccggctgcgggcccgggacgtggtgtgtgttctcatctgtattgagtccctgtgccagcgccacacgtgcctggaggccgtctcaggcctggagagcaacagcagggtcttcacgctacaggtgcaggggctgctgcagctgcaggctggacagtacgcttctgtgtttgtggacaatggctccggggccgtcctcaccatccaggcgggctccagcttctccgggctgctcctgggcacgtgagggcgcccaggggggctggcgaggagctgccgccggatcccggggaccctcctactgatgcccgtggtcaccacaataaagagccctccaccctccccac

SEQ ID NO: 57109 - DNA, 1765 bp, Homo Sapiens
ttacatttacagtgtagcaaaagagaaagtaactatgttgctgctggagatcaatgaagccgagtgaatgggggctgaatgtgcgagtccatagctgaagaggagcgccagatggtggaggaatacacttatttatgaagtggacttagtagttttaagcagaaccatgaaaacctctgtgacaactccctccagctccaagagtgccgggaggtggggggcggcgcatccgcggcctcgagcttgctacctcagcccatccccaccacccctgacatcgagaacgctgagctcacccccatcttgcccttcctgttccttggcaatgagcaggatgctcaggacctggacaccatgcagcggctgaacatcggctacgtcatcaacgtcaccactcatcttcccctctaccactatgagaaaggcctgttcaactacaagcggctgccagccactgacagcaacaagcagaacctgcggcagtactttgaagaggcttttgagttcattgaggaagctcaccagtgtgggaaggggcttctcatccactgccaggctggggtgtcccgctccgccaccatcgtcatcgcttacttgatgaagcacactcggatgaccatgactgatgcttataaatttgtcaaaggcaaacgaccaattatctccccaaaccttaacttcatggggcagttgctagagttcgaggaagacctaaacaacggtgtgacaccgagaatccttacaccaaagctgatgggcgtggagacggttgtgtgacaatggtctggatggaaaggattgctgctctccattaggagacaatgaggaaggaggatggattctggttttttttctttctttttttttttgtagttgggagtaagtttgtgaatggaaacaaacttgtttaaacactttatttttaacaagtgtaagaagactataacttttgatgccattgagattcacctcccacaaactgacaaattaaggaggttaaagaagtaatttttttaagccaacaataaaaatataatacaacttgtttctcccccttttccttttaagctatttgtagagtttatgactaaatagtctgtgcaggttcatagaccgaagatactacacactttaaaccaattaaaaagaaccaaaagtaaatagaaaagacattgaatcaccaaggcctgggatcaacctgggctgtccacacagaaaacaaaaacccaaccaaaccaagccctgttgtgctcactggtgcaaagagaagatcagggcagcttaagtggtctaagaatccttcaggcattctttaaggagaaaaaggatacctttgattttgtgtgtttcatgctctggattttttttttttttccttctctgggtttaagagattttttttgaaatagtgaggaactgaccattatatgccttcactggcttcttgtgcaataatatgatgttttaagtgtgcaaacaagttagagctggcagctgaatgatagacaaatagtgcaaatttgccagcttggagatagaaaggaattcaacaatatatcaaatactttccttcccacctttttccttttttttttttttttctgatttgattctggttacagtgccataaaccttgttacatatgtatatcagaatgtaagaaaaaaaaatttatttaaaaatatttttcgcaaaaaaaaaaaaaatcttggtgtgtttctgttgattgtgtaaaaatttattttcattatataaatgaaactgg

SEQ ID NO: 57110 - DNA, 3033 bp, Homo Sapiens
gagtgtgtgacccagcccttcccccgtggccaagcagagagagtggccttgaggaagccatagcagcaggaccagcatggcctctgctgcctctgtgaccagcctggcagatgaagtcaactgccccatctgtcagggtaccctgagggagccggtcactatcgactgcggccacaacttctgccgggcctgccttacccgctactgtgagataccaggcccagacctggaggagtcccctacttgcccactctgcaaagaacccttccgtcctgggagcttccggcccaactggcagctggctaacgtggtggagaacattgagcgcctccagctggtgtccacactgggtttgggagaggaggatgtctgccaagagcacggagggaagatctacttcttctgtgaggatgatgagatgcagttgtgcgtggtgtgccgggaggctggggagcacgctacccacaccatgcgcttcctggaggatgcagcggctccctatagggaacaaatccataagtgtcttaaatgtctaagaaaagagagagaggagattcaagaaatccagtcaagaaaaaataaaaggatgcaagtcctcctgactcaggtgtccaccaagagacaacaggtgatttctgagttcgcacacctgaggaagtttctagaggaacagcagagcatcctcttagcacaattggagagccaggatggggacatcttgaggcaacgggatgaatttgatttgctggttgctggggagatctgccggtttagtgctcttattgaagaactggaggagaagaatgagaggccagcaagggagctcctgacggacatcagaagcactctaataagatgtgaaaccagaaagtgccggaaaccggtggctgtgtcgccagagctgggccagaggattcgggactttccccagcaggccctcccgctgcagagggagatgaagatgtttctggaaaaactatgctttgagttggactatgagccagctcacatttctctagaccctcagacttcccaccccaagctcctcttgtccgaggaccaccagcgagctcagttctcctacaaatggcagaactcaccagacaacccccagcgttttgaccgggccacctgtgttctggcccacactggcatcacaggggggagacacacgtgggtgtggatggccagggtacctggggactcaggcggctgccagttctgctcaccaccatccgtgcttggcacagaagtagctgcatagaaagagcactggatttgaagtcagaagacctgggttcttgaaccagcctgtcaaccagttgtatgactttaaacaaggcatctcacctcttttcatcttgttttcttccaataatgttagagttcatgtaatcacattctctagaaccatttagtttgtgttaactatgaaccaagcagtgtggtggccactggtgacttgaaaatatagagaaaaaaaaaacctgctctatatctgaaagagctcttgggaagacagagaaacataaagaggaaattacagcacagtgtggtgggtgttacgggaagtccaaccccagcattatgggagttcaggggaaggggcatagcccagcctggaaggagagggtgagtgggggatggctttctgaaaagggtggtctaaaggatgcctatggtcaatagggaaaagaggggaagaagcatcttaagaagaggaaacagcagagaactggctggatgacctgtgactctggagcactgggttgtctccattgtcattatgggcagatgtgtgccatccccagccgacgccactcactgcctccttcctcctggtgttgccacttctgggtgagattaaggtgcagggcctgggggcaggaggacataaggtatagccataaatcataacccagggaccacactcaaccctagggaaattgtcttcctgatcagttgattaccatctgaggtcaagaaatgagatagtgggagcaaatgggtcacaaatagctcagctgtgggctcagaaactgctaggtaaaagaattccagaaggaggccagggcataagttggatgacctatgaactttagtctaaagaattgagactaccgtaattgagactactgtagtgacatctgagaaatgggatggaagagtgaccatgttttattttcttgttcttgtcactattgtattttattttgcataatcatgcccttcactgacagtctccttaacatcatctgtttactctgctcagtgtaaactacaatgctctgtcatctccctactgggtctcctgggaggaggggagccatccagggtgcaaactcaaaggcagagggcacagcgtgcttaggcccaagcttagaattcaattgagaagttctgttgttcatccttacctcagcaggtagaaaagaggtggagatcagaagccagggattagagattgaattgctttccctgggagtgtgcagtatctcattaaaatgttgtatattcaaaaaaatacagacacacacaagtgcctatataatgataaaacatatccaaagcacccaaacctgtgattccagaaaagtagatcctatttttgtttatttttattggctttagctgtgtcttttgaaaggactattatcctctaaaatgtatgtgtatgaagatcctggcttgcagctcgggagctttacacaccttgtgtcactttatcttggtaacgagccaagatcatgcaaccagttcatccatgtctgacccaagagctcttaactgctatgctgcactgcctcattcagagatagatgcctgcatgggtcctggcgattattttaatgctggctacacccccacaggtgacttggattcagaaatacaatttatatttcttctttttaaattgttttattttatttttcttttaatagttatatgtcagtgagaacaatttatatgtcttacactgagaaataaaactgctcataagtgaaaaaaaaaaaaaaaaaaaaaaaaaaaaaa

SEQ ID NO: 57111 - DNA, 4544 bp, Homo Sapiens
cttccggcgggggcgcggcttggactgaggagcggacccggccgggcgcaggggctggactggcggagcaggtggggtccgcggccgccggagcgttccggtcggcgtctgggcatctcggcctcggcagaaagcgcgaccgccctgctgcgcggggcccgcggcgatgccgttcctgcacggcttccggaggatcatcttcgagtaccagccgctggtggatgcgattctgggctccctggggatccaggaccccgagcggcaggagtctctggaccggcccagttatgtcgccagcgaggagagccgaatccttgttctcactgagctgctggagaggaaagcccactctcccttttaccaggaaggcgtgagcaacgccctgctcaagatggctgagctggggctgacgcgggcggccgacgttctcttgcggcatggggccaatctcaactttgaagacccagtcacctactacacggccttgcacatcgccgtcctgcggaaccagccggacatggtggagctgctggtgcatcacggggccgacgttaatcggagggaccgggaaaaactgctctgctccatgctctggccagcagcgacggggtgcagatccacaatactgagaacattcgtctcttactggaaggaggggcagacgtcaaggccaccaccaaagatggggacacagtgttcacctgcatcatcttcctgcttggtgagaccgtgggaggggacaaagaggaggcccagatgatcaaccgcttctgcttccaagtcacacggctgctgctggcacacggggccgaccccagcgagtgcccagcccacgagtccctcacccacatctgcctgaagagctttaaactgcacttccctctcctgcgcttcctcctggagtccggagccgcctacaactgctccctgcacggtgcgtcctgctggtctggctttcacatcatctttgagaggctctgttcccacccaggctgcacggaagacgagagccatgcggacctcctgcgcaaagctgagactgtcctggatctcatggtgaccaactctcagaaactccagctgcccgaaaacttcgatatccaccctgtgggcagcctggcggaaaagatccaggccctccacttctccttgaggcagctggagagctatcccccgcccctcaagcacctgtgccgtgtggccatccggctctaccttcagccgtggcctgtggatgtgaaggtcaaagccctgcctctgcccgacaggctgaagtggtacctccttagcgagcacagtggctccgtggaagatgacatctgataggtctcaggctacaggaacgggggacacgggcagctcaggtcagcctgttggtagatgctgggacagcattagaagagggtctttttgatctgggagatgagacgggatccttcatgagaaaagccagccaggtagagcctgaagctgtgatcactccagtggtgaagggtgcagctctggttcttccagagagactgcccccttccctccagcggcactccaagtcccccccatgttggaaagaggaacagggcttggattgatgtttataccctctgaattggagggcagtgccagggcatttgcagaagctgggaaggaccaagcctcagcaccccagggctgcggggctcttgttggccgcacgtggcagtgcagctggagaggaagcctggggcacgtcctgtgcggtgccaccaaggccccacccctgccccttttccttccaggttctgttactcacagaagtgtttctggtgggctctgcgggagaagacactaagggccccacaggcttgtttcatggtgttgcaagccaagctggcccctgcctgttcctgtagctctggggccaggtcagccgtggccccacctaccagaactgtgctctgctggcagctgtgcttttgccaaacccagggcctcagcgaccatgacttctgctaaaaagcaatcatgagtgcgtggctggggacagacctctctgaagtgtctcctgttgtgaggggctcactttggagccactgaagagccgactgtgccacccacttgcgagcctcagtcccttccaagctgcactggtcattgggaattgtgtaaacacctctggggataagctgaggtgactaaatgatatatttatattataagattaaactgactttcttggccttaacaaggtccttatataaaatttccaccccgcccctccatagttcaggatagaggctcccacagcagccggtaaggaagtgggtggcaggtgtgaggggatgctgtgtttggggggttgtttccaagtccctgcaaagaagcaccactctagactggcaagggcctccacagtgtggaggtcccattttattatttttttttttcgagacactctgtcacccaggctggagtgcaatggtgcaatctcggctcactgcgacctctgcctcccaggttcaagcagttctcctgcctcagcctcctgagtagctggcattataggtgcccaccaccatgcctggctgatttttgtatttttagtagagacggggtttcgccatgttggtcaggctggtctcaaactcctgacctcaggtgattcgcctgcctcggcctttcaaagtgctgggattacagacatgagccactgtgcccggcccccattttattttagttttattttgagacagagtctcgctctgtcacctaggctggagtgcagtggcgcaatctcacctcactgcaagctctgcctcccgggctcaccccattctcctgcctcagcctcctgagtagctgggactacaggcgcccgccatcacgcctggctaattttttttttttttgtattttaagtagagacggggtttcacctgttagccaggatggtctcaatctcctgacctcgtgatctgcccgcctcggcctcccaaagtgctgggattacaggcgtgagccaccgcgcccagccccattttattttttactttaaatgcctgccaaggagcagcctcaagcccagagaagactgaggctacggggaacttcccttgctgcaggctgttgtaacactttaagggccccaggtctccactgccaagcaggacttggcacatgagcacccaccccacagcaccatcaggcagcacccatgggctccaccagcccagctctgtccctcccctaggtaaagatcacactgaagtcttcaagtccccagcaaccaagttgggggtggtttccttcctcttcaggcagccaggcccatggctggaaggccgggctggaggcccagggaatcggttactgatgtggccaccctattcccacatggggagcaccaggagccctggagccccttccacccaatcccatctcgcaggagagcagggtctgggctcctgcctcaccgctggttcagcagcaccctccccgccgggtcccaccttgccttttgaagaagagcccgcataatgagtggacggcagacagctatatttagtggtgcctcgacactcacgaaccgccagcgtggcgcctggatcttgcccagctgccagctccccccaccaggactgtggttcctcagtttctcctgccagccccggctcatctcagggcaaagctatagacatggtagatctcatcggggaggttctcctgcctctcctcggccaggaggctgaggcctgcactgcagatgatcctgcggaccacgtcaaggtcccggcacacgctgctgtccacgtcgtccagaatcacgccctcctgggccatgttgtctttgatgacgatgatgccgttggggcggaggctgcccttgcagcgccgcaggaactcggccaggtgctgatcggtgaggtggcctggggagggcagaggcaaggttaccagggcaccatgcaagcggatgtcggcactggatgggatgtacttctcagccccgctgagcccctcatttgtgcccagcattttgtgtgcacacatggcctcattggctctcagtcccgagagatttactaaaccccaattcatagaataggaaactgtggctcagaggtcatctacctaaagacacattaagccagaatttgacttgacgggatggcttacaagtcctgcctgatacctacacaccatgatgccccacccctgccaggcttggatcggaggagtgaacctgggctaagagtttggcattgcaggagctcccagagagactgccttccctacactagaagtccccacaaaggcttctgagaccacaaaatacaaggccagacctagagtgtccacagcaggcctgtgctgcccgcctcaggaggtggccgactgctgctagcggcctgccgccacgtcagcagcccagggcacagcgctcgaggtgtgctgttaggctaagagggtgcagggctagacacgaagcttaaactattcatcttattaaaaataaaacccttataaaactccaaaaaaaaaaaaaaaaaaaaaaaaaaaaaaaaaaa

SEQ ID NO: 57112 - DNA, 2162 bp, Homo Sapiens
ccagaacacccctatcttctaggattgacactggctgtcaaactcatccttcaaggtgattcctggcctgccctcctcctccaggcagcctgtcctcctcctccaggcagcctgtcctgaccctcagcagcctctcctggccttggcagagcccctcgtgtcctcccttgcagcacgcatgggaagaaaggccatcgtcctcgccattgctaacaccagccttgcgtttcctctttgccagcacctggtgacgttctgcctgggtgaggacgatggcgtgcataccgtggaggatgcctccaggaagttggccgtcatggatagccagggccgagtctgggcacaggagatgctgctgcgagtgtctcccgaccatgtcacgctgctcgacccggcctccaaggaggagctggagtcgtacccactgggcgccatcgtgcgctgtgacgcggtgatgccacccggcaggagccgctcgttgctgctgctcgtgtgccaggaacccgagcgcgcgcagcccgacgtgcacttcttccagggcctgcgcctcggggcggagctgatccgagaggacatccagggggctctgcacaattaccgctcgggccgcggggagcgcagggcggcggcgctcagggccacgcaggaggagttgcagcgcgaccgctcgcccgccgctgagaccccgcccctgcagcgccgcccgtcagtccgcgcagtgatcagcaccgtagagcggggcgcgggccgcggacgaccccaggcgaagcccattcccgaggcagaggaggcgcagaggcctgagccggtggggacctcgagcaacgctgactcggcctccccggacctgggtccccggggtcctgacctggcggttctgcaggcggagcgggaagtggacatcctgaaccacgtgttcgacgacgtagagagctttgtatcgaggctgcagaagtcggcggaggcggccagggtgctggagcaccgggaacgcggccgcaggagccggcgccgggcggctggggagggcttgctgacgctgcgggccaagccgccctcggaggccgagtacaccgacgtgctgcagaagatcaagtacgccttcagcctgctggcccggctgcgcggcaacatcgccgacccctcctctccggagctgttgcacttccttttcgggcctctgcagatgattgtgaacacgtcgggggggccggagttcgcgagcagtgtgcggcggccgcatctgacatcggatgccgtggcgctgctgcgggacaacgtcactccacgtgaaaacgagctctggacctcgctgggggactcgtggacccgccccgggctggagctgtccccggaggagggacccccatacagacccgagttcttcagcggctgggagccgccggtcactgacccgcagagccgcgcctgggaggacccagttgagaaacagctacagcacgagcggaggcgccggcaggtgacccaagcgacacagcagggccgaggctgggaagtccgggggcgcggccggtccgcctggccccgcctgacccgactgtcttacttcctacagcaaagcgccccccaggtcgctgtcaatggtcaccgagacttggagccagaatctgagcctcagctggagtcagagacagcaggaaaatgggtcctgtgtaattatgacttccaggcccgcaacagcagtgagctgtcggtcaagcagcgggacgtactggaggtcctggaggacaaagagaaagtgtcagagctggaggcagtgatggagaagcaaaagaagaaggtggaaggcgaggtggaaatggaggtcatttgacctgccaggcgcccttcgcaaagagtgacgaggccccgtgggagaacggactcctcagactctccccaatagcggaagtcgatcttctgaaggatggccaatctgctccggccctggtcttcccccatcccggtggacagacttaacgatccttgctgcagtccctccggagaggatctggactggctgggagtggggagggcgtggagacagtctacggaaagcgctagcagacccccgagagggtgcagtggagccctgagcattgtaatatgcggcccagcctataaacagcctccgtgcttagcaaaaaaaaaaaaaaaaaaaa

SEQ ID NO: 57113 - DNA, 2820 bp, Homo Sapiens; identical to SEQ ID NO: 26485

SEQ ID NO: 57114 - DNA, 4563 bp, Homo Sapiens; identical to SEQ ID NO: 23649

SEQ ID NO: 57115 - DNA, 1192 bp, Homo Sapiens
ctgtgattctcactatactggtcctgaggaaagggcttctgtgaactgcggtttttagtttttattgtggttcttagttctcatgagacccctcttgaggatatgtgcctatctggtgcctctgctctccactagttgagtgaaaggaaggaggtaatttaccaccatgtttggttcctgtttataagatgttttaagaaagatttgaaacagattttctgaagaaagcagaagctctcttcccattatgacttcggaaatcacttatgctgaagtgaggttcaaaaatgaattcaagtcctcaggcatcaacacagcctcttctgcagcttccaaggagaggactgcccctcacaaaagtaataccggattccccaagctgctttgtgcctcactgttgatatttttcctgctattggcaatctcattctttattgcttttgtcaagacagcctggagctgttgcccaaagaattggaagtcatttagttccaactgctactttatttctactgaatcagcatcttggcaagacagtgagaaggactgtgctagaatggaggctcacctgctggtgataaacactcaagaagagcaggatttcatcttccagaatctgcaagaagaatctgcttattttgtggggctctcagatccagaaggtcagcgacattggcaatgggttgatcagacaccatacaatgaaagttccacattctggcatccacgtgagcccagtgatcccaatgagcgctgcgttgtgctaaattttcgtaaatcacccaaaagatggggctggaatgatgttaattgtcttggtcctcaaaggtcagtttgtgagatgatgaagatccacttatgaactgaacattctccatgaacaggtggttggattggtatctgtcattgtagggatagataataagctcttcttattcatgtgtaagggaggtccatagaatttaggtggtctgtcaactattctacttatgagagaattggtctgtacattgactgattcactttttcataaagtgagcatttattgagcattttttcatgtgccagagcctgtactggaggcccccattgtgcacacatggagagaacatgagtctctcttaatttttatctggttgctaaagaattatttaccaataaaattatatgatgtggtgtctcaaaaaaaaaa

SEQ ID NO: 57116 - DNA, 4443 bp, Homo Sapiens; identical to SEQ ID NO: 29582

SEQ ID NO: 57117 - DNA, 3492 bp, Homo Sapiens
aagccgtgcgctcccgggctgcgaggtctggctaggctacgggccacgcgccgccgccgctgccgccgccactgtcctcttcggaggcgcgggcccgacggaaaccatgtttgtggctcgcagcatcgcggcggaccacaaggatctcatccacgatgtctctttcgacttccacgggcggcggatggcaacctgctccagcgatcagagcgttaaggtctgggataaaagtgaaagtggtgattggcattgtacagctagctggaagacacatagtggatctgtatggcgtgtgacatgggcccatcctgaatttgggcaagttttggcttcctgttcttttgaccgaacagctgctgtatgggaagaaatagtaggagaatcaaatgataaactgcgaggacagagccactgggttaaaaggacaactctggtggatagcagaacatctgttactgatgtgaagtttgctcccaagcacatgggtcttatgttagcaacctgttccgcagatggtatagtaagaatctatgaggcaccagatgttatgaatctcagccagtggtctttgcagcatgagatctcatgtaagctaagctgtagttgcatttcttggaacccttcaagctctcgtgctcattcccccatgatcgccgtaggaagtgatgacagtagccccaacgcaatggccaaggttcagatttttgaatataatgaaaacaccaggaaatatgcaaaagctgaaactcttatgacagtcactgatcctgttcatgatattgcattcgctccaaatttgggaagatctttccatattctagcaatagcgaccaaagatgtgagaatttttacattaaagcctgtgaggaaagaactgacttcctctggtgggccaacaaagtttgaaatccatatagtggctcagttcgataatcataattctcaggtctggcgagtgagttggaatataacaggaacggtgctagcatcttcaggagatgatgggtgtgtaagattgtggaaagctaattatatggacaattggaagtgtactggtattttgaaaggtaatgggagcccagtcaatgggagttctcagcagggaacctcaaatccttccctaggttcaaatattccaagtcttcagaattcattaaatggatcttctgctggcagaaagcacagctgagacaagctaactggagtaactttgctgttttgctgcttgttgcatgcacactggaatggaaagcgagctcccttttccccttccccagcgccgtttgacctctcccaaggatacaccagcagcctgcttactactaaacgcaatccaaaaggcctttaaaaatacagtgtatattttttgtactagtcagtttattgacactatttgaaacttttgaaatataaacggagaggctttctgttgagacattgtcaccaaaacaattttttgaaatgttcctgaaactaatttgggtttaaagattaaaagggttgttaccattcttatctgagtagttgggaggaggggaataccactttagttcatttggaaaatatagacatatttcttttgctttcttaaaacagcttaaaatgatgaacttttataattttaatttgaagattgaataaatattttttataaagattgttttgagtgctgatttgtttactttttgtagatttgctttatccatgatattcagtacaactctgtcatttctttgtaatatttaaaaaatattagtaaaggagtgaattaataaagtagtaatagtaaaatgaaaggaacttgactgtacagtttgtagcccaggttaaggcatttgggtattgtttcatttaaccaatttggggactaagatgggaaacactttttttattaagtttttaattcatagtcactaaagagataaatgtttcttatatacatttgtgtatttttatggtgttatttattccatggcttagcttccttcaaatcaaaatttggacacacactattaagagaagccattaaaattttactaaaattgtgcatgtaaattaattgtcagcattccatgtctcaagattttcttaatttagttcgctgtttaaattaattcatgtcctgtaaagttctgaccttgataacaaagctataaatatttaagtttgctaatatgcgtaagtattatcggtaagttacaagatggaagaagaataacagtagggcacagtcattctgtgaatccttttacttatcaaaatttggtagctattctaaggcttttgcagaaaaataagtgttcaatgtttgtagttcttcaaaagcatgttgcagtagccagccatactatgtgtattcccagtatcatgtacgcactaaaaaaaatgtgtgcttgctgctgctgtgagtgaaccattgcttaagataaaaaacttaactagatctgtaaatgtacagaatagcatcagatgtttctgagagattaggaaaatgttttgaatttataaaattaatgtttttctttgtaacatttatatatattttttaacattttaagtttaacagattgtattcctttcaagtttctatacttgcttaagcaatcttgatttgagtaagggtcttgatttgtgctattatgttctgttagttttggcatgaatatactaaagcttttttttttttttttagcatgtgttttctcctctttggttctctttgtatttactacttttctctttttcttgtgttttttttttcctgtttttgttttgtttggtgttttgttcctgtcttcattgtttcaggtatttctttacccctctggattccccacgggctggatcgagatggtccagttatgcccagctccttcctcctcctcctcctcctctggtagagcactcttgcgatgctgacactgccaacctccagtatcctcaccctcgcagacgatatctctctcggcctcttaatcccttacctgagaatgaagggatttaaaacactgatttaacattgaaaggccttattcaagtgcttgtaaatgctttcatttctggctgctttttgtttttcattttctttcagaagatttttctaacttagggtctgtcttgcatgtattacaaccagaatacagtgtttggaacctaaatctgtttgtgcgtctgcatcaaaggaacatttgcttcactgggtgataacctttgatgaaatgagatatgtccaagtaacgttaactgtgaagttacacacagtagctgacttcaaagtgcctgttcctgtaaattttattttaaactgttaccatagtcttaagttgtttatgctttatcagactggctaatgtgaaagcataatattatgaagtttattctgccttatgagaccttaaaaaatggatttcattttacaggctaatgttgtaactgactagtatgtaaaataaatcattcctgtgtataaagcagcaaaacctaaaaaaaaaa

SEQ ID NO: 57118 - DNA, 19271 bp, Homo Sapiens; identical to SEQ ID NO: 31799

SEQ ID NO: 57119 - DNA, 3178 bp, Homo Sapiens; identical to SEQ ID NO: 29388

SEQ ID NO: 57120 - DNA, 3258 bp, Homo Sapiens
aaggctgtggaccccagagaaggtggcaggtggcccccctaggagagctctgggcacattcgaatcttcccaaactccaataataaaaattcgaagactttggcagagagtgtgtgtgtgtgtgtatggttgttgggcgtaggacaggtttcggggatgcgcggtacgcggtaccacccctcggaggcccccacccccagacgcccaggccgcctccccactccccctcaagcagccccagccggggactttccgtcgcggggaaggggcggggaccctgagcgaaaggtgcggaggcggcctgccggggtggttcggcttcccgttgccgcctcgggcgctgtacccagagctcgaagaggagcagcgcggccgcgcggacccggcaaggctgggccggactcggggctcccgagggacgccatgcggggaggcaggggcgcccctttctggctgtggccgctgcccaagctggcgctgctgcctctgttgtgggtgcttttccagcggacgcgtccccagggcagcgccgggccactgcagtgctacggagttggacccttgggcgacttgaactgctcgtgggagcctcttggggacctgggagccccctccgagttacacctccagagccaaaagtaccgttccaacaaaacccagactgtggcagtggcagccggacggagctgggtggccattcctcgggaacagctcaccatgtctgacaaactccttgtctggggcactaaggcaggccagcctctctggccccccgtcttcgtgaacctagaaacccaaatgaagccaaacgccccccggctgggccctgacgtggacttttccgaggatgaccccctggaggccactgtccattgggccccacctacatggccatctcataaagttctgatctgccagttccactaccgaagatgtcaggaggcggcctggaccctgctggaaccggagctgaagaccatacccctgacccctgttgagatccaagatttggagctagccactggctacaaagtgtatggccgctgccggatggagaaagaagaggatttgtggggcgagtggagccccattttgtccttccagacaccgccttctgctccaaaagatgtgtgggtatcagggaacctctgtgggacgcctggaggagaggaacctttgcttctatggaaggccccagggccctgtgtgcaggtgagctacaaagtctggttctgggttggaggtcgtgagctgagtccagaaggaattacctgctgctgctccctaattcccagtggggcggagtgggccagggtgtccgctgtcaacgccacaagctgggagcctctcaccaacctctctttggtctgcttggattcagcctctgccccccgtagcgtggcagtcagcagcatcgctgggagcacggagctactggtgacctggcaaccggggcctggggaaccactggagcatgtagtggactgggctcgagatggggaccccctggagaaactcaactgggtccggcttccccctgggaacctcagtgctctgttaccagggaatttcactgtcggggtcccctatcgaatcactgtgaccgcagtctctgcttcaggcttggcctctgcatcctccgtctgggggttcagggaggaattagcacccctagtggggccaacgctttggcgactccaagatgcccctccagggacccccgccatagcgtggggagaggtcccaaggcaccagcttcgaggccacctcacccactacaccttgtgtgcacagagtggaaccagcccctccgtctgcatgaatgtgagtggcaacacacagagtgtcaccctgcctgaccttccttggggtccctgtgagctgtgggtgacagcatctaccatcgctggacagggccctcctggtcccatcctccggcttcatctaccagataacaccctgaggtggaaagttctgccgggcatcctattcttgtggggcttgttcctgttggggtgtggcctgagcctggccacctctggaaggtgctaccacctaaggcacaaagtgctgccccgctgggtctgggagaaagttcctgatcctgccaacagcagttcaggccagccccacatggagcaagtacctgaggcccagccccttggggacttgcccatcctggaagtggaggagatggagcccccgccggttatggagtcctcccagcccgcccaggccaccgccccgcttgactctgggtatgagaagcacttcctgcccacacctgaggagctgggccttctggggccccccaggccacaggttctggcctgaaccacacgtctggctgggggctgccagccaggctagagggatgctcatgcaggttgcaccccagtcctggattagccctcttgatggatgaagacactgaggactcagagaggctgagtcacttacctgaggacacccagccaggcagagctgggattgaaggacccctatagagaagggcttggcccccatggggaagacacggatggaaggtggagcaaaggaaaatacatgaaattgagagtggcagctgcctgccaaaatctgttccgctgtaacagaactgaatttggaccccagcacagtggctcacgcctgtaatcccagcactttggcaggccaaggtggaaggatcacttagagctaggagtttgagaccagcctgggcaatatagcaagacccctcactacaaaaataaaacatcaaaaacaaaaacaattagctgggcatgatggcacacacctgtagtccgagccacttgggaggctgaggtgggaggatcggttgagcccaggagttcgaagctgcagggacctctgattgcaccactgcactccaggctgggtaacagaatgagaccttatctcaaaaataaacaaactaataaaaagcaaaaaaaaaaaaaaaagaaaagaaaaaacactgcatttgggcaccatctcagctcccttgcatccaggtgcagcatggactgagttcttgacaacagaatgtggtcagaagtgacatatgccaacacggggtctgggtgggggctcccccacatcctttccttgcctatgagctggaacataacacatgcctatgatccagctttggtcatacccaaggggaaggtggagcaagaaatgaaaaggaacctgaatccctgaatgactgcatggatagaaccactaagaaaaataaacttttatatttttata

SEQ ID NO: 57121 - DNA, 4047 bp, Homo Sapiens
gggtgtgctgggggactgtgcagctcgaggctccagaggcacactccagagagagccaaggttctgacgcgatgaggaagcacctgagctggtggtggctggccactgtctgcatgctgctcttcagccacctctctgcggtccagacgaggggcatcaagcacagaatcaagtggaaccggaaggccctgcccagcactgcccagatcactgaggcccaggtggctgagaaccgcccgggagccttcatcaagcaaggccgcaagctcgacattgacttcggagccgagggcaacaggtactacgaggccaactactggcagttccccgatggcatccactacaacggctgctctgaggctaatgtgaccaaggaggcatttgtcaccggctgcatcaatgccacccaggcggcgaaccagggggagttccagaagccagacaacaagctccaccagcaggtgctctggcggctggtccaggagctctgctccctcaagcattgcgagttttggttggagaggggcgcaggacttcgggtcaccatgcaccagccagtgctcctctgccttctggctttgatctggctcacggtgaaataagcttgccaggaggctggcagtacagagtgcagcagcgagcaaatcctggcaagtgacccagctcttctcccccaaacccacgcgtgttctgaaggtgcccaggagcggcgatgcactcgcactgcaaatgccgctcccacgtatgcgccctggtatgtgcctgcgttctgatagatgggggactgtggcttctccgtcactccattctcagcccctagcagagcgtctggcacactagattagtagtaaatgcttgatgagaagaacacatcaggcactgcgccacctgcttcacagtacttcccaacaactcttagaggtaggtgtattcccgttttacagataaggaaactgaggcccagagagctgaagtactgcacccagcatcaccagctagaaagtggcagagccaggattcaaccctggcttgtctaaccccaggttttctgctctgtccaattccagagctgtctggtgatcactttatgtctcacagggacccacatccaaacatgtatctctaatgaaattgtgaaagctccatgtttagaaataaatgaaaacacctgagctggtggctgtgtactttgactggtacatggaggctattttaatccttctaactaaactaaaatagattaaaggaattaaactaaaatacaagtaaagctagacaaaggcccagaaatcatactgtaaggaaatgttattggaagctgattcccagagcagaccacatatacagcaggatgtgcctgtggcatgaagattttctttctcttttttttttttttttagatggagttttactcttgttgcccaggctggagtgcaacggcatgattttggctcactgcagcctctgcctcccaggctcaagcacttttcctgtctcagccttccgagtagctgggattacaggtgtgtgccatcatgcctgactaattttgtatttttagtagagacagggtttcaccatgttggccaggctggtcttgaactcctgacctcaggtgatccacccacctgggcctcccatagtgctgggattcaattttttttttttttttttcaaaagaagggtaagtgcttgctgttcccatccctgaaacattgcatgtatttaagaaaaacaaaatgttagtggcatatttgcttctaatgttcccctaaccctacatgcatgttttatgtgcactcatatgagtatctttaaatataatccctttacatctgtgttctatgcaaagtctctcatttctttcaagacagcctaatgaaggccatcatctctgtaaaccacttgtcactacaaaaatacaattactcaccaaaaagctttaaaaaataaagctgtgtctttagggagacccaataaagaatgcaatccatgccataagcaggagttgatacaccaccttattagctaaaaatatatataacacaatatgagtaatgtttaagatctgttttaaatttaaaacaatgaattgaatgctctaagaggctcctacaggcgctccaggccactctcagagactcccaggagttgttgaactatatttggagaaaacagccactgaatattatcatttctcctttaaagagagtttgtaaggggggaacatgcattttatcagacaatttatccaaagcattgcagaacatgagtgctgatgagggcacctcttgtgctgagtcccctcagctatcagtgttcttctcaaggacacatttggaaggttttaacattgaaagtgagcggaggacttgggggcagagcagcacaaagaaacagccttacactgggcacatggaggagacgtccaccctgcagccaggactggggttcacgtcactgccagagctacactcgccttctgcttccacggtcctgttaattctagatcagagagcaagaaaaaagtacagaacatatcctctacggttatttcctgctttctaattaaaaaaataataaccatggcaagagagaaagaaagagaaagtactcagaggctgacactgacatttcacttcctcgctctcctaagtttaattacaacagcacgtgcagccacgtcagccaaatgacttcatttctgatgtgaaaacgcttaggccatgatgtcgttcattttctgtaattgctgccttttctcattctgttaatagtcccggcaaccagatttcagtggggcatgacgtgaatgtgtatatggtgattcaaatgcaaaatttgtttatggggcttttaatcgaacgcgtgtgtgcctgaacattcttgctcaagttgatgaatcatggggtggaataaaggctgagtttagtttttcactttagcaaaggggcaatggggtgcctactatgtgcgagacattgggaggggcttctgaattattctggatatcgtcattttgcagtgtgcataattttgccaaccgttgctttcgtagcccctgctaagtgttgactttttaaaatataagtttattgtaaaagtgacatgaaaattacaacagatattccagaccaaaataatacaacaatcccagcatctgattgagtcagtgtttgctgtttcccctgcactttcctagttcttaagcatttgcgtatgtaaacattcatatttgcaataaaaaagtgagcttttatattctaaatttttacttaacttaattcaatgctttctactcatttttctatacttttttttttgaggcagagtctcattctgttgcccaggctggagtgcagtggcgtgatcttggctcactacaacctccaccttccaggcttaagcgattctcatgcctcatcctcccaagtaggtgggattacaggtgcccaccaccaagccctgcaaatttttttgtatttttagtagagacagtgttttgccatgttggccaggctggtctcgaactcctgacatcaggtgatccacctgcctcggcctcccaaagtgctgggattacaggtgtgagccaccacgccctgcctactctttgttttctttcctccccacccattttcccccgtcctgtcccctccttccagcctgagatgtaggctccaccttaactgtgctcagatacacaagtgagggctttttaacttgattatgccttttaaaaatactatgtatgtaaaatatttattcatctgcaatttggcttccctaacttaacattgcatcatgaaactctttggaacaacagctatctagatagctgactcattcttttggattgctacgtaatctcacttaatacagatgtatcatgattgattgaatcattgccttgttgatgggccttcagattatttccagttttttgccactgcaaacaataaacatccttgtacatactaaaaaaaaaaaaaaaaaaaaaaaaaaaaaaaaaaaaaaaaaaaaaaaaaaaaaaaaaaaaaaaaaaaa

SEQ ID NO: 57122 - DNA, 5256 bp, Homo Sapiens
agtcgcacagctacctggtaggtgactggaggtgttgatcagtgcttggtgggattttgctgatgtggccccaagcccgcctccctccccaccctgcgatggcagaagaaactcgacaaagtaaattggcagcagccaagagaaagttaaaagaatattggcagagaaacagccctggtgttccagcaggagccaagaggaacaggaaaacaaatggcagcatccatgagacagccacttctggtggttgccactcacctggagattcagcaacaggtatccacggggagagccctacatcatctgctaccctgaaggatctggagagcccgtgccaagaactagcagtagtcccagactcgaggtccgtaaaagtcagtcaactgaagaacaccatcaaatctttgaaacaacagaataaacaagtggaacatcagctggaagaagtaacatgatttctttgtttgctcgcgacatgactgctcggtttgggggacactcagatgtagaggccccgagtctcgtctcacccactcccagcctggggaagaaggctcaccccccagagtccaccccatcccccacagggtccctgataacccggtcccatgggtgggcctgtcccggggcaggggcagtggtggcattctggggacatgtctcttgcagtaccatctctgcctctgcctggttagatctctgtcttcctcttcctacaggaaaagaaagcaaacaacgagaaacagaaagccgaaagggagctagaggttcaaatccagagattgaacatacagaaagggaaactaaatacggacctgtaccacacgaaacgttctctcagatactttgaagaagagtccaaggatctggccgtccgtctgcaacattcattgcagcgtaaaggagagttagagcgggctctctctgctgtcaccgccacacagaagaagaaggcggagaggcagttctccagccgcagtaaagcacgtatggagtggaagttagagcagtccatgcgggagcaggcactgctgaaagcgcagctgacacagttgaaggagtcacttaaagaagtccagctagagagggatgaatatgctgaacatctaaaaggagagagggcccggtggcagcagaggatgagaaaaatgtcgcaggaggtttgctcgttgaagaaggagaagaagcatgataaatatcgggtagagaagctggagaggagcttgtccaaactcaaacaccagatggctgaacctctgcccccggagcccccagcagtgccctctgaggtggagctgcagcacctgaggaaggaactagagagagtggcaggagagctccaggcccaggtggagtacaatcagcgcataagtctcctgaatgaggggcaaaaggagaggcttcgggagcaggaggagaggcttcaggagcagcaggagaggcttccagagcaggaggagaggcttcagcagctggccgagccacagaacagcttcaaggagctgaacaatgagaacaagagcgtactacagttggagcagcaagtaaaggagctgcaggagaagctaggcaaggtgaaggagacggagcgtctggaagctgccagccagcagaaccagcagctaacggcccagttgagcctcatggctctccctggggaaggagatggaggaggacatctggacagtgagggggaggaggcacctcggcccattcctagcatcccacaggacctggagagcagggaggccatgagcggctttatggaccacctggaggagaaggcagacctgagtgagctggtggagaaagaagaacttggattcttccagtactacagagagagatgccatcagaaagtttatcaccctataacaaagccagggggcagtgccaaagatgcagcaccgggaggaggacaccatcaggctggccctggacagggaggagatgaaggtgaagctgctggagctgcaggagatggtgttgcagctggtggcgactacaagggacacagcaaattcttggtgactgcccagaaccctgctcatgagcccagtccaggagccccagccccccaggagcttggggctgcccacaagcatggtgatctttgtgaggtgagcctcactgacagcgtggagcctgtgcaaggagaggccagggagggttctccccacgacaaccctactgcacagccgatcgtgcaggaccaccaggagcacccaggcttgggcagcaactgctgtgtgccattcttttgctgggcttggctgccaagaagaaggagataaacatcaccatcgtcaaagagctgctgaagaaatttttaaaaaagaaacaaagttatggggttaatctcctacacaattcatttacttcgtttgaatgttatagccacttatgattatttgtgtttctaatttatagtttaagtttatttgtaaatagttaaaagagagtgggtctctgtggctttcactgatgttcactctggcatactttcgcaattttctttttcaatttcataattgtaggtcattagcatgcatattgagtttgcccttacgtggtgggagttcaaacacacaaagacccactatttgcacaaaactattcttgctggtttggaataggctgccatgtgtttttaatgttattgcagcatgtatattcattacagaattcagataaaatgtgcctatgttctgctgttgtttgatctaatcttaatcacagtgagctcttcattagcacaatatgtggtttgccccaagtgtgcactatttaatactttgtaatatgccaccaagagtactgacatttagagttgtttaaaggccgagaactggaaacagcctttccctcattttctgtgtattggtgatgggagtaataacattttgggggagctttttaaatttcacagaagaggaaagttgcctgctctggcaggtatgtgcaagatagagtgtgtttcatttgttctgttgccaagaattagtgctgtactattgtagttcctttaggatttgtatgtgctctgggctcatgaagatattgcatcatgagcttcagcagttgtactcttttttgatgacctaaaaagggcttatttctgaggaatgaaaggttcccatcattgactacggatgtggaaaacctttcctagcttagagcatttgtatctatattttaaagtcagagttcatgttacctgttttaatcacatgactgcatgtcccagtacacaaaagggcactggttggcattcttcttaatgtatttagtaaagatcagaagaaatcctttaagagttcaaatgtccctggaacaggcatacaggctctagtcaagaatgaattagagtgaaggaaagctgtgtgacacctggcattcctctgttcatggagcttctttgaggcttgaagattgattttaccatctagaccactctgcctattcttcaaccaccttggttactttgacataggaattgacttcttttccttgaatggaaaacactttgaaataataataaacattgttataaactaatatatgtgagagtgcttagttgaaacaaaaaggagttttagtagacagtattatactatctttgaaaatcaaggagaagtttatgcaacttaaaatgtgtacaaactgcagtgcaatctactgttggtgaatgtcagtgtattatcaggaaacatgtctatacaatcacagagttatatttcctcacaaacttctttgtgaagagtgaaatgtgtttctgtacctctgggtttcacttacgggcatattttgtgcagtatttatgtgattgtgcctatgcatgatgaatgaatgaatttcagttgtacattgcctaaatcataacttgatgatgcttgggaaagactcaacagttaaaacttcatgaagttctaatgtctgtgttccaaaacacatcacattattaggatgtagggagatatgtatgtgtgctccctggggtggggatttctagttactagaccatctccatttttagcatttggcatcctcatgatacttttataaatacgacattaacaggagagcagcagtacgattttgccgatggaataacagatttgccggcaatcactgaaagagtgcaaacatcgggtccttgtgacttcaacggactcttccaaattgtatgaatgtatcaatgtattagataaacccagtttcagaatgataaagaaaaaatgttagaccaaataatgcggctagttaacagtggtacgatttctcgcccgtggctttaaaatgcacttaaagtcctgtccttgccttttattttctgaacttgatgtttttgcattctttgagttcagtttaaagacaactacgagcatctgtaaccaatctgacaataatgtgttcatcaggtgcctgtggattaaatcacatactggcatatttaagctgaatgtcaatctggaaaataaattgactgtattaacggaaataccactctttgtgtagatatttgtcgtatattgaagaaaaagctaaaaagaatggaaatcgcatgactataacttaagtctttcttcaaagtgcatgcagtcttttgcgatacctcattcagccaagtattggtattcttcctcattcggtataaggcagctttcaatttgcttagagggcaacattggaaggttagagttcatcagaaacagaattctaaaatgtgagttcaattcaataaatttgaatttctgtaggaagaatcaaatcaccgatttaaagattgcaatatataataatcatttttaaagtattggattaaatctgataggttttccagaaatgaacaaaaatcagctctaaaaccaaagctgatttttagaaaatttgaaaatgtaaatcagccctatccatactatagtttctctaaaactttatctgaaagagtcattttaaaataactattaaacaatgtaactgctatcttaatgttctgaaataagttaaaacattttaaaatatgaatactgtaaaggaaataaacggtgggaaggaaaagtagagaaagaaatgccaattccagtccaaagctttatttgccaagttttcttagaatgaattttaccaatttatgaattcttgtaagcggaatgtaaaacggaaatactgaaagacttttgcctaaagtggcattattgactgctggtgtgatgctactgtaatgtaataaattattaagttgttgcaaagtgc

SEQ ID NO: 57123 - DNA, 6782 bp, Homo Sapiens
gttgtcgtaggggcccggtccgtgagggactgctaaggaagaggctgcatggcgcggtagtcccccgagtggaggtcggctgcccctgggaaaccagagagtcggagggagtccatctggagcggccaagtaggtcggggaagggccgcgcctgacgtctggccgcaggtggtgactctcaaaaggaaataggatcatggcagcagatgatgacaatggtgatggaacaagtttatttgatgtcttttctgcttctcctcttaagaacaatgatgaaggctcactggacatatacgctgggttggacagtgctgtttctgacagcgcttccaaatcctgtgtaccatcaagaaattgtttggacttatatgaagagatcctgactgaagaaggaactgcaaaggaggcaacatataatgatttgcaagtagaatatggaaaatgtcaactacaaatgaaagagctgatgaaaaaatttaaagaaatacagacacagaatttcagcttaataaacgaaaaccagtctcttaagaagaatatttcagcacttatcaaaactgccagagtggaaataaaccgcaaggatgaagaaataagtaatcttcaccaaagattgtctgagtttccacattttcgaaataatcataaaactgcaaggacatttgatacagttaaaacaaaagatcttaaatctagatctccacatttggatgattgttcaaagactgatcacagagctaaaagtgatgtttctaaagatgtacatcatagcacttcactgccaaatctggaaaaggaaggaaaaccacattctgataaaaggagtacttcacatttacctacatctgttgagaaacactgcactaatggtgtttggtcacgttctcattatcaggttggcgagggtagctcaaatgaggatagtagaagaggaagaaaagatattagacatagccagtttaacagaggaactgaaagagtacgaaaagacttaagtactggctgtggtgatggtgaaccaaggatattggaggctagtcaaaggctacaaggacatcctgagaaatatggtaaaggtgaaccaaagactgaaagcaaaagttcgaagtttaaaagtaactcagattctgactataaaggtgaacgcattaactcttcttgggagaaagagacccctggagaaaggtcacacagtcgagtagactctcaaagtgacaaaaaactagaaagacaaagtgaaagatcacaaaatataaataggaaagaagttaaatcacaagacaaagaagaaagaaaagttgatcaaaaacctaaatcagtagtaaaggaccaagatcactggagaagatctgaacgagcatcacttcctcattccaagaatgaaataacattttctcataattcaagtaaataccatctagaagagagaagaggatgggaagattgtaaaagagacaagagtgtaaacagtcatagttttcaagatggaagatgtccatcttctctttcaaacagtagaactcacaaaaacattgactctaaggaagttgatgccatgcatcagtgggaaaatacacctttaaaagcagaaagacatagaactgaagataagaggaaaagagaacaagaaagcaaagaagaaaataggcatattagaaatgaaaaaagagtacctacagaacatttgcagaagactaataaggaaactaagaaaaccactactgatttaaagaaacagaatgaaccaaagactgataagggagaagtccttgataatggtgtttctgaaggagcagataataaagagcttgcaatgaaagctgagagtggtccaaatgaaacaaaaaacaaggacctaaaattgagttttatgaaaaaattgaacttaactctttctcctgctaaaaagcaacctgtttcccaggataatcagcataaaataactgatattcccaagtccagtggtgtatgtgattcagagtcttcaatgcaagttaaaacagtggcatatgttccctccataagtgaacatatcttgggggaagcagctgtcagtgaacataccatgggggaaaccaagtcaacgttattggaaccaaaggttgctcttctagcagtgactgaacccaggatcggtatctcagaaaccaacaaggaagacgaaaatagtttgttagttaggtctgttgacaatactatgcattgtgaagagcccatttgtggtacagagacttccttcccatctcctatggaaatacaacagacagaatccttgtttccatcaacaggaatgaaacaaaccattaataatggaagggcagcagctcctgtggtaatggatgtattacaaacagatgtgtctcaaaactttggcttggaattggataccaaaagaaatgataattcagattattgtggtatttctgaaggtatggagatgaaggtggcactttcaacaacagtgagtgaaaccactgaaagcattttgcagccttcaattgaggaagctgatattttgccaataatgctttcagaagataataacccaaaatttgagccttctgttatagttacaccactggttgagagtaagtcgtgtcatctggagccttgcttacctaaagagactctagattcttcacttcagcagactgagttaatggaccacagaatggcaactggtgaaacaaactcagtatatcatgatgatgataactcggttttgagcattgaccttaatcacctgagacctattccagaagccatcagtcctctgaatagtccagtgagacctgtagcaaaagttcttagaaatgaaagcccacctcaagttccagtgtataataacagtcataaagatgtgtttttaccaaattcagctcattctacctctaagagtcagtctgatctcaataaggaaaatcaaaagccaatttacaaatctgacaaatgtacagaagcagacacatgtaagaattcaccattagatgaattagaagaaggagaaattagaagtgatagtgaaacatctaaaccacaagaaagttttgaaaaaaattccaaacgtagagtgtcagctgatgtgcggaagtcaaagactatcccacgacgtgggaaaagtactgtgtgtttagataaagacagtaggaaaacacatgtaagaatccatcagaccaataacaaatggaataaaagacctgataaatctagcagatcttcaaaaacagagaagaaagataaagtgatgagcacttccagcttggaaaaaatagttccaattattgctgtaccctcttctgaacaagagatcatgcacatgttacgaatgataagaaaacatgtaagaaaaaattatatgaaattcaaggcaaaattttcattaatacaatttcacagaattattgagtcagcaattttgagttttacatctttaattaaacatctcaacttacacaaaatctctaagtcagtgactaccttacagaagaatctctgtgatattatagagtctaaacttaagcaagttaaaaagaatggcatagttgatcgtttatttgaacagcaactaccagatatgaaaaaaaaattgtggaagtttgtagatgaccaacttgattatttgtttgcaaagcttaagaaaatcttagtatgtgattccaaaagctttggaagagatagtgatgaaggcaaacttgaaaaaacaagtaaacagaatgcacagtattcaaatagtcagaaaaggagtgtggacaactccaacagagaattgctgaaagaaaaattatcaaaatcagaagaccctgttcattataagtctttagtgggatgtaaaaaatctgaggaaaattatcaagaccaaaataactccagtattaacactgtaaagcatgacattaaaaaaaattttaacatctgctttgataatataaagaactctcaatccgaagagcgctccttggaagtacactgtccaagcaccccaaagtcagaaaaaaacgaaggaagcagcatagaggatgcacagacatcccagcatgcaactttgaagccagaacgaagtttcgagattcttaccgaacagcaagcatcgagccttacttttaatttagtgagtgatgcacaaatgggtgaaatatttaaaagtttgttgcaaggttctgatcttttagacagcagtgttaactgtactgaaaaaagtgagtgggagttaaagactccagagaagcagctgctagagactcttaagtgcgagtctataccagcttgtacaacagaagagctagtttcaggggtggcttctccatgtcctaaaatgattagtgatgataattggtcattattatcatctgaaaaaggtccatctctgtcttcagggctttcattgccggttcatcctgatgtgttggatgaaagttgtatgtttgaagtgtctactaacctacctttaagtaaagataatgtgtgtagtgtagaaaagagcaagccctgcgtttcttccatacttcttgaagatctagcagtctctttaacagtaccatcgcctctgaagtcagatggtcatctcagttttttaaagcctgatatgtcgtccagttcaactcctgaagaagtcattagtgctcattttagtgaagatgccttacttgaggaagaggatgcatctgagcaagatattcatttagctctggagtctgataattcaagcagtaaatcaagttgttcttcttcctggacaagccgatctgttgctccaggctttcagtaccaccctaatctacctatgcatgccgtcataatggaaaagtccaatgatcatttcattgtgaaaatacgacgtgcaacaccatctacctcttctggccttaaacagagtatgatgcctgatgaattattgacatctttgcccagacatggaaaggaagctgatgaaggaccagagaaagaatatatttcatgtcagaacacagtttttaaatctgtggaggaattggaaaactccaacaaaaatgttgatggcagcaagtcaactcatgaagaacagagctctatgatacaaacacaggttcctgatatatatgaatttcttaaagatgcttcagataagatgggtcatagtgatgaagtggctgatgaatgtttcaaattgcatcaagtatgggaaacaaaagtgcctgaaagcattgaagaattgccttcaatggaagaaatctcacactctgttggggaacatcttccaaacacatacgtagatctaacgaaagatccagtcactgaaaccaaaaacttgggggaattcatagaagtaacagttttacatattgatcagttgggatgttctggaggcaatttaaatcagagtgctcaaatattagacaattctttgcaggctgatactgtaggtgcttttattgatttgacacaagatgcttcaagtgaggctaaaagtgaaggtaatcatcctgcattagctgtggaagacttgggatgtggggtgatacaggtagatgaagataattgtaaggaagaaaaggcacaagtggcaaacaggcctttaaaatgcattgttgaggaaacctatatcgacttgaccacagaatctcccagttcatgtgaagtaaaaaaagatgagttaaaatcagagccaggatcaaattgtgataactcggagttgcctgggactttgcataattctcacaaaaagagaagaaacatttctgatctaaatcatcctcataaaaaacaaagaaaggaaacagacttaactaataaggaaaagaccaagaaacctacccaagattcttgtgagaatactgaagctcaccaaaagaaagccagtaagaagaaggcccctcctgtgactaaagatccctcatcattaaaggcaaccccagggattaaggattcatcagcagcacttgccacttctacaagtctttctgcaaaaaatgttattaaaaagaagggagaaattatcattttatggacaagaaatgatgaccgggaaattttattggagtgtcagaaaagagggccatcatttaaaacatttgcatatttagccgccaagttggataaaaatccaaatcaggtctcagaaagattccagcagctaatgaagctctttgaaaagtcaaaatgcagataagttgctgaattcctgggactcttaactgatattgcatactacacagaagcttcaaattcctcatgttttaaatgagcactagagggaggtttatcacctttttggttaccagatgataatctatatttgttattactcagtgactctctaatttcacatcagcatgttcagcttgtgctagtcatcattctgatttgcttatctgtttttggtcaaaatatttatttttaaacatgttagaacttaccaaaatgaaagcaacagtgatgtattgaaatcttagttttgatattttaaagaaatgactttctagattaaaaaaatagttttgtagcattttaaacttagtgactatttagttcaattgttcatccattttttatttgcttttataattgcctccttgttttggtatattgtaaaataatttaaataatgtatttataaatatgtataattatgatgtaaaataccgtgtgtatatgtatgtatgtgtgtttctgtatatgcacacacataaacggctttgcctagccaaggattttttttatctgtataaaactttttgtataaagtttgctttcaataacagtaatgtataataaaaccatgtaaagttttgttgtaaaaaaaaaaa

SEQ ID NO: 57124 - DNA, 4311 bp, Homo Sapiens
gggtctgctctggacttgggaggctccgttgcctgctcccggagggagacgcgctgccgaggagaacccagcgggagaacatttcaggataggaataggccaagtgctgagaagatgagtcttaggattgatgtggatacaaactttcctgagtgtgttgtagatgcaggaaaagtcacccttgggactcagcagaggcaggagatggaccctcgcctgcgggagaaacagaatgaaatcatcctgcgagcagtatgtgctctgctgaattctggtgggggcataatcaaggctgagattgagaacaaaggctacaattatgaacgtcatggagtaggattggatgtgcctccaattttcagaagccatttagataagatgcagaaggaaaaccactttttgatttttgtgaaatcatggaacacagaggctggtgtgccacttgctaccttatgctccaatttgtaccacagagagagaacatccaccgatgtcatggattctcaggaagctctggcattcctcaaatgcaggactcagactccaacgaatattaatgtttccaattcattaggtccacaggcagctcagggtagtgtacaatatgaaggtaacataaatgtgtcagctgctgctttatttgatagaaagcggcttcagtatctggaaaaactcaaccttcctgagtccacacatgttgaatttgtaatgttctcgacagacgtgtcacactgtgttaaagacagacttccgaagtgtgtttctgcatttgcaaatactgaaggaggatatgtattttttggtgtgcatgatgagacttgtcaagtgattggatgtgaaaaagagaaaatagaccttacgagcttgagggcttctattgatggctgtattaagaagctacctgtccatcatttctgcacacagaggcctgagataaaatatgtccttaacttccttgaagtgcatgataagggggccctccgtggatatgtctgtgcaatcaaggtggagaaattctgctgtgcggtgtttgccaaagtgcctagttcctggcaggtgaaggacaaccgtgtgagacaattgcccacaagagaatggactgcttggatgatggaagctgacccagacctttccaggtgtcctgagatggttctccagttgagtttgtcatctgccacgccccgcagcaagcctgtgtgcattcataagaattcggaatgtctgaaagagcagcagaaacgctactttccagtattttcagacagagtggtatatactccagaaagcctctacaaggaactcttctcacaacataaaggactcagagacttaataaatacagaaatgcgccctttctctcaaggaatattgattttttctcaaagctgggctgtggatttaggtctgcaagagaagcagggagtcatctgtgatgctcttctaatttcccagaacaacacccctattctctacaccatcttcagcaagtgggatgcggggtgcaagggctattctatgatagttgcctattctttgaagcagaagctggtgaacaaaggcggctacactgggaggttatgcatcacccccttggtctgtgtgctgaattctgatagaaaagcacagagcgtttacagttcgtatttacaaatttaccctgaatcctataacttcatgaccccccagcacatggaagccctgttacagtccctcgtgatagtcttgcttgggttcaaatccttcttaagtgaagagctgggctctgaggttttgaacctactgacaaataaacagtatgagttgctttcaaagaaccttcgcaagaccagagagttgtttgttcatggcttacctggatcagggaagactatcttggctcttaggatcatggagaagatcaggaatgtgtttcactgtgaaccggctaacattctctacatctgtgaaaaccagcccctgaagaagttggtgagtttcagcaagaaaaacatctgccagccagtgacccggaaaaccttcatgaaaaacaactttgaacacatccagcacattatcattgatgacgctcagaatttccgtactgaagatggggactggtatgggaaagcaaagttcatcactcagacagcaagggatggcccaggagttctctggatctttctggactactttcagacctatcacttgagttgcagtggcctcccccctccctcagaccagtatccaagagaagagatcaacagagtggtccgcaatgcaggtccaatagctaattacctacaacaagtaatgcaggaagcccgacaaaatcctccacctaacctcccccctgggtccctggtgatgctctatgaacctaaatgggctcaaggtgtcccaggcaacttagagattattgaagacttgaacttggaggagatactgatctatgtagcgaataaatgccgttttctcttgcggaatggttattctctgaaggatattgctgtgcttttcaccaaagcaagtgaagtggaaaaatataaagacaggcttctaacagcaatgaggaagagaaaactgtctcagctccatgaggagtctgatctgttactacagatcggtgatgcgtcggatgttctaaccgatcacattgtgttggacagtgtctgtcgattttcaggcctggaaagaaatatcgtgtttggaatcaatccaggagtagccccaccggctggggcctacaatcttctgctctgtttggcttctagggcaaaaagacatctgtatattctgaaggcttctgtgtgacaggaaacccaagcctaagaaacaattaagtggttctcatctctaattaactgtgaaaccatttaatccaaacatgtaagcacacactcacttattaagtcacatacttttctaggtgctggggattgagaacgaatcgatgtaagattcctcctttagggcagagacagaccactgacaaatacacagatagacaaggaatttcccatggtaaaaagggatatcagtaattagaggaccgtgagactcagagatgtgtgtgtgtgtgtgtgtgtgtgtgtgtgtgcgcgcgcgcgcgcacgtgcacatgtgtgtaggtagatggagggggtgattattttgggtggtcagggaagtgctcagtgagggaagaacttgtcatgagaatctctgagcgtgccaggcagactcggatatttttataaatttttaacatggccacttgcagaagagcttgaatgggacgtgcagggagaatgggaaggatggagcaggtagctcatctggccttgtaggtgccgggaacgagcaagacatgttttgaaatgtaagatcacagactgttttttgcaagaccacattatattactttattattttctgctttttcttttaacgacattagtgtttttgatcactatattttaaaatgctttttgtgagccttttggttatgtggaatctgttccttagctctgattttttattcttatggagcgtcttaggttactacatgaaggtaagactgccacagtcccccagggaggcacactgtgttttactgattgatttgaagatgatagagagcctagggggatgagtctattggactcaaaggttacattttgtttttccatttaatttaataatcaacaaaacgacaaagtcagtttaatatctttcttctgctgagtcttcaggatgttagctagtctttcaaaagccattgctacaaaagtgcaaatttctcatttcctgtgggtctctagaaactctctcaatatttaaagccaaacaaatccatcttttctgagagacagaaactaaaaaattcagagttaattcactattaaaaacagcaaggccctgctatttcccaagaataaagaaatttaaaattctcattgtaagaagtatgaacttgaagctagaattggtttatttctggcagctacttacaatattaagaactttactttttaaatttgagacaatttcacaggaaagcaagaaattagtctattgtgaaatgtttttacaactaacttggaatatgctgcaaatcactagtaagtagagacacatttaagataaaatgattaataaaacaattggtaattctgaataaggatctgaataaatccagatcacagactgttcctttaccaatatgtaaaagaatgtgcaaaattcgtaaaaatatacccaaaaatttaccagcaacagagaagcaaagaatggagttcaaccttacactataaacatctaatagatatgtatgaaaaaaaaaaaaaaaaaaaa

SEQ ID NO: 57125 - DNA, 958 bp, Homo Sapiens
aaagggttgtagacatggcggccatcaggatgggaaaactgacaaccatgcctgcaggtctgatatatgcatctgtaagtgtacatgcagccaaacaagaggaatccaaaaagcagctagtgaaaccagagcagctccccatatatactgcaccaccgctccagtctaaatatgttgaagagcagcctggtcatttacaaatgggctttgcttccatccgcactgcaactggttgttacattggctggtgcaagggtgtttatgtctttgtgaaaaatgggataatggatacagtacaatttggaaaagatgcttatgtctatctgaagaatcctcctcgagattttcttccgaaaatgggagttattacagtttcaggattggcgggcttggtttcagcgagaaaaggttccaagtttaagaaaattacttatcctctgggactggccactttaggagcaactgtttgctacccagttcagtccgtaataattgctaaggtaacagcaaaaaaggtatatgctacaagccagcaaatttttggagcagttaaatcattgtggacaaaaagcagcaaagaagagtcactccctaaacctaaagaaaaaactaagctaggatcctcttccgaaatagaagtacctgcaaaaacaactcacgtcttgaaacactcagtgcccttgccaacagaactcagctctgaagcaaagaccaaatcagaatccacttcaggtgcaacccagtttatgcctgaccccaagctcatggatcacgggcagtcccacccagaagatatagatatgtacagcactagaagctgaagtagactgcatgcagagactacacagaaaactacaagatgtgtggcgttgcaaataatgatgaaaataaatcatgtaatgggtaactgaaaaaaaaaaaaaaaaaaaaaaaaaaaaaaaaaaaaaaaaaaaaaaaa

SEQ ID NO: 57126 - DNA, 10693 bp, Homo Sapiens
cgacagctctgactccatctagcgcggcggcggcggagcctgagggagcgagcgaggagagaggcgcgtccacctggcgggcccagcgtatggagctgaggcagaggcggcggcggcggcggcagcagtagcagcggcggtggcggctaaggcagctcgaacagctgcggcgacggcgacagcccagccttgactgcgaccgcgctagctacagcgcctgctgcctgagcccgccagcgacgtgcgcctcgggagtcggcctgtgaggttggacagcatttggacttggaatgaaacaataagaggttatattcatggataaccaacaagataaggctattgttgcctcagccaacggagaaaacactctgattaatggggtcaaagaaaatgactcagaggaccaggatgtggcaatgaagtcatttgcagctctagaagctgctgcacctatccagcctacaccggtggcacaaaaagagaccctgatgtatcccagaggtctcctgcctctaccctctaagaagccctgtatgcagagcccgccctctcctttgggcctgattgaagcacccgaacatgctgctaatagtgcttctgtgaatgccatctccctcacatctggcattgcaaaaggcctgaacacatggtcacttcccaatgaatgtgagaaagctccatttgccataatggagcctgcaggcatgtcagctctgaatggggactgtctcatgcagccaagtcggacttgcttaggctgcttcatggaatccaaggatgcagtagatcctgagccagggatcagtctgaaagttggtgatctaaatagggattatgaaacgtgtgcagtctctgatatagggattcagtgtattaatgctggagaaaatatgaaatatggagagcagctgctctcagaccagctcctaggcttccccctgcataagtcaagggcaggagacagacgagaaactgagaaacctgacattgacttggaggatccggctcagaaaagctattatgaggcattactgttagacaagtgcaatacagaagaagctttgcttgcaaattccaatcaggattggggttacttcgagacttttattagtgaaagtaagattgaactgcttgacctctgttccaaaaatgagctgtctgtcaacctattctctgaagaagatgtggataactacatgtttgatgatgatgaatcaacactaggcagtgatgtctgctccctgaaaattcgatatgaatcctttcaggacaatgttcgagacaagactactcttttgatgcaggaagatgcccaattcaacttttttcccagcgtctttactacctgccccaagcgagagtctaagagtggggccctgaagcagagcagtgatttttcccaattcaaggtccctgatgtgagcatcatctggggggaggaagataaaaacttggacaagaagaaaggcaaagaggaaggacaggaagacaaaggtgtagagaagaaagatggaaaggataatggagaaaagcctgccttaaataaaccatgcagtgggactgaagtagagcaacttaagaatccaaagcagggccatcttgctaattccctggagacatcagggagtttcagtgatgatagttccttcattgagatctcatatgatgctatgggtgagatcaaggactgtagtcgctatatggctcgggacactaattctggcagctcctcctcccaacagaactatgggctgcgagccaagagaaaagtcagatacagtgaagattatctatatgatgttgactcactagagggtgaaaaagtaaatgagaggaaggaatggctgccagttggttccaaagaggaagatgatgatgaatggtgtcccaaaaagagaagaaaagtaacccgtaaggagccccctgttattatcaaatatatcatcattaatcgctttaaaggtgagaagaacatgctggtgaagttgggtaaggtggatgccagtgagacaacagtgaatttgagtgagaatcagctcaacaaatatgccaagctggcacccttgaaaggcttctggcaaaagaagaagaagcagagaaacaccaacacggactccatcaagacacctttttcccaaaagcaaagctttgaaccaggtagctttgaggtgtcatttctgccacctgctcgcaaacgaaaatctaaacttggcaacaggcacaggattcaaagaatcccatccattgaaatttcagcaagtagtaaacagatttcattatgtaatgatcagaggcacgctagtaatcataaagaagatggaggcctaaaaggtacactgaagtcagcacctctgggtgctcctagctgtgcaaatggatcacatttaaatgacatcacaggccctgactcagtgaaagtcaaagcccaagacacagagtttaaggggccagagaggaaagtgctcaataaaatcaaatttaaaagtgaagctaggttaaaatctaagaaagtcaaagctgctgggcaagaaagcaagccaattgttcaaatgagccctctcttggaaaaccaatcctcaaaggctaatttaaagaatgaagttattcctgggacatcaaacagttcccgtctatctgaatttcatgaggcaaaggctgctaagagttccacttttctaccaacgacatgctcttctgaaatgcctttatcatctgctaatgttaccactaatatacctgttatcccgggagggtatctgcagacattgttagatgcttctgacttgtcaaataacactagtatctcatacttcagccaccattctccagagcaaaatgaaggcagcctcactcaaaccgaaaaatcatttgtacccctccagcctacccaggactgtgtgctcacctcatcctctgactctgagctgcagcagtcatctcataacttcaaaatggaatcaagcaactatagaaatgtgtggcccaacaaggctacttctggcacccaggaattcatggctgaagtctcaagggagatagccccaacccaatccagtgaatttggagcctcccaagtagtctccatggaaaataacctcacacctacaacatacaatccaatctgtctcaatagtggtggcagtaattgcaacaaggtcctgtatgactccatgcaagatacccaactcccatctgatgactcttaccaattatgtcactttaataatggagagatctgctttcctttccagcaggggccagtcaatatggatgatggtcggctctttagctttgattcaatggccccactctctgtcagctcaagtaattattgctccttaagcttgaagtcctgtgaaaaggatggcgatgatgatatcactgatgacttcctggcccattgcagccctaagctggtgatccagcaaagcattgatgagatagcaccactaaaggagtccactgacctcctggatatatccaacttcacccctgacaaattccgccactcttccctttcagagatgtccccaccggacacccctagtctttcccctcaaattaccagatgtgagagtatgaagacactaggaacactaaaggggttccaagagggtgtcccaggaccattggacagtgtggaaaaaatcaagtgggactgcagtaccctttcacggcaggtccaaatggaggatggatttactttaaataatcaccagtttcagttccatatgttcaatgatgaggattctgtcagcctgctccaaaaaaacccttgcctgtcaacatttaatgatccatctggtcaaattagtaccaacaacaaagtgtcaaaatcaagaaagaaaagttcacccagcaagagtggggctatgaaccaaagctcttctcagaaaaacaccaggaaaaaatccctcaaaggtaacaacaaggggattgaaaaaccacctggcaaaaactcccgccaggtccctaagtccacaaagaaagggaaatacatggctgccatcaatggagagaaaatgcaaattggcattggccgtgggggaagccaaaccaacaccatatcctccactgggaagacattggctgaatgtatccaacatggtggccctatggcctctatgaagatgccaagtcaaaagggactttctggagattgggccttggggaaggagagcagcccaggctggagtgatatgagcatgggcaccaacaccaacagccttctggatgatgaccaacgggaatttcaggagccttcctatatcttgtccaacattgcctctggtatggcagatgtgcagagattcatgatggcctccatagagcccctttgggaacccatggagcaccatggggatcccaacatattctactcccctgagtccaatagtctaaaattaaaaaccctcaaaatattggctgggacaccacaggagtctaagaaaaagatcaacagtgggtcccaaggagccactaagaatcacaggtcaatcaagggtgtgagcaaaagcaatgggaaaacagcaataggtgatcctggtcgtgcaaacatgcctggttataacgaggactctcgctctaccttctttgataaaaagtatagtaacatgagcactttaggcaataacggaccgacacacaaaaagttgtatcgtcacaaatccagctccaaggccctgagagatgagaaatgtaagggaaagcacatggagcgagaacaggtccacaaggatgagtctgggacagcttcttttgaaaaactgagggattccgactacaatctcctaaaagcagaaacaaccttttgggttttacctgtgtttgaagaagagactcgcattttccagaaagacatttgatgtttgtgttttatttctttcaaaatatgccttgtggtatgtatgttgacatgtaagtgcttaaagaaaagaattttaaattgtgggaatacgtctttggagcaaactttaatctcatgttctatgtaaaagacttaaaaagtcatacagttgcacaagtagtttatgcactatttacccacaaggaaaaaattgaaaacattgtgccaaactacaaacaagtgactgtactgtatatatttttacttctatatcaacatttggttgtatttggggaagttgtccctgttaatttactagaaacattccagtgattcttgctattaaccacccccacttatgtggatagcacctgtagatcatggtggaaaaatatgttgtgttacacaatttaccaaaattaaaggatactgtttgaaatgtgccaaattttcttacctcatctcacagattcacccacagtttaaagctcattaattatttttaaatggatatatacacacccaaacatatatatgtatatgtttgtgtgtgtgtgtgtgtgtgtatatatatgtatatatatatatacacacacacacgttcttttaaagttttagactctactgtcctgtgtggaaacatgaacagctaaacaaggcaaaataaagattttcttgttccattgtgtaagggttaaaattttggaaaagtctgaaggccacaacagctaagtccatcagggacccaagtatatgcatttacagaacgttttacaaggaaacaaaacagctgctttcaaagtttgttttctaaaagcaaaatctgtagctgaaaattatttaaagtgcaaagttatattgctgatactttatatctcagttttatatattttataatagtctgggataaattataaaaatagctataaaatcaacactaatgataaatgaagtatatagaatgcttttatttaaatagtttcctaaatgttttattccagttttgtcaaaagtgcactcatatcatggctttagtgttctttcagtgtttaatcttgcaatgccaatgtcatttaaagaaaatgttaaggcatcccagttcaaccaaatttttcttcttatgagtaaagtacatttactatcagataagatgaacaatttgtggcaacaactgatttgggccatatacccttagtctgaggataaccaatatttgatgccacacactaaacttaaatctcaattttaagtacaaatttttaaatcacattttttattcagtactccccctactttttaaaaaaaatttcacagccccaacattcctcactactactttttcttcccttttattcaccacttgacttctaacatttgatctcttttctttgcacaattgaaggcctgtgcatctgatgactgatgcattatggcacagatgagataatggatgtgagagcgctttgtagatcataaagtgctatacagatataggggattaatattattaatattgttagttgttgtcgttgttactattcttattaatattgttactaacctattaacttgtgaatatataggctggggtgggagggtggagaataagtgggaagggaaaaaggggatttaacaaaaaaagggaagatgtttcaaaaggaaaattttaagcaaaatatgaacctacctagtcaatgccacctaaatgtattcacaaacagagaagcaacatttgaaagtagtcagagagaaatggaaggaagcctgtcatgtatataagtatatacacttcccggtccatgattcctttcaccagcctgctctattccttacagctgggtcgtaaaatgaacaagcctgtgttcttgatcatgtgtgttcccagcgtcagtctcttgtgtctgtggggatgagtgggtgaggagcattctgtgaggctggtacaggcccattcctaggctttaatgctctgtttgcagtgagccctggaaaattacttagtggaaaggcaccagatgaaacatgtctcctgccccatagctaccattcaaaagggaaaataaccaaactggaaaaccttcttctatttctctattctgatagctagctgtactaaatgctatggccagtccctagaaactggtctttgttttgtttttgtttttgtttttgatttttctgttttgcagctgaattttggcttggaatcaccaactctgcctgtattgtgatccccaagactccagacctcagagtcacctgctggcttagaggagtggagtgctttctatgtaatgaaaaggtggcaattaatgaaaaaataaagaaaatgttccattaatacaatgtgtttttataaaagtaaatatgggagcagttgtcccagttttttttcggtatcagttcagctttggagaatggggtgtgagtggggtaggacagcctgaaactgttggaaacaatttccttgtgagaacttgctatcataagtcctttggaatggatattctttcagttgctcctatggagcccattaagggccaattctagggcatagttcatccctttctccaaagagaattgttattttaaagtacctttttaattggcctgcagtgtattatatgtttttaatatataaattagtgacgcataaccagtcactttgtactgaaacataaaaagaaacagagtttgagaaatgagcaataggccgaggcagaagatgtttattctcttaattgcatttaatattcctctcagtacattgtgttctgagatgttcatcatttagcattttgttggtcctgtctctgctctcacagttctttttcttcctgtcataaccagctgccttagtagagtataaaaatagtgttttgccctatcactggtatctcaagtcagaaatatatattatccttggtctgaaattcctgattaccgctcccttctaaccttccccctctgagaagctgtttcctattaatgcctccctaacagagtcccatttaatctttactttcctggaaatggtaacctcccttattcttcttacttaatctcagaccttggtcttagaatttttcttttatggtctcatatcccacctgcccaaattgtcagggctcaacaatcttaggctgctttcttctggaagttcagaaggaaaccttcccattcttaattgcctttaattgctttggctattttcaaatctaattttttaattaaattttttttaatttttatagagtaggggtacaaggacagttgtgttacatggatatattgcttagtgttgaaatctgggcttttagtgtacccatcaccgaaatagtgtacattgtacccaataggtggtatttcatccctcaaatataattttaaacacacactcgtgcccacatggacaaattatatcacatgactgaggaaacttagaaattccttttccctgaagatctgttaagaataggtctcatctcctgccctggttaggtgctatattatatggagaagggtattgagactttgggggtcatgtttgggctgtgataactggcttgaaccagtgaccatcctttctgcctcgccaaggtctcttataccagcttcttcacatatgctgcttcctcccagctttcccttctgacttcttgttactctgcaactatgtgtcaaggccttaccttttcctgatgttttcaaacctcctgcattactttgatcatcacttcttcagccatctcactgaagtccttggtgctagctgggcttttgtgacaactttcaccttctctgaactttttccttgctgggaagcatctgcgtgtgtgagggggctacggagggaagtgtgtgtgtgtgtaagagagaggcaaaaggatgcttcaaaagctataaacaactctagcaagcatcctaagtcctatgtgaggttttgcagttctagtgaatttctgttttagtaggtttcaattagcatttactgcctaaaggagaaaaaccatatccaaggaccttttagccatgcttgctattaccaagctggaccagtgtgatgtagatccaacatgtcttcagcttacagatgctctcagaacagttccaagaattgaagagagctaagtttttatgctgaagaggagaatggagcactagctagtcctaactattgctagaaatagaaatgtttattttctcctttattattgagaaattatctaatttaaggagtaaccattttcatttagggatttttttaatgactgcccatcactacagaaatatgttctttttataaaataaaactaatgtgaggttggtttgttttctaatcataaaattcactaagcctatagttacatttagaagatttagtaccaaaatcaaacttttagtaacaaacaggaatcttgtcaacacaatgtaggccagggattttgtaaaggtttctcaaagacccaaataagggagaaaaaaattttagttgggctgtttaacttgggaaacactgtcatcagcttgagggtcctcagccagcatgtgattattttgatgacaggactcaggctaccctttaaggcacattttttactcagcattaaacactagctacagtcgtgaagcagagctcccattgcagctacatacttgagatgtactcttggtttcagaatcgtaactaagaggtaaggcattggagaaggacaatgtaaaagacagaggtttagaacaaagtttatggtgtgaatgaggctttcaaaatcagtatctgggtaaattgatactaaagacactgaagaaacactcatccacataagatggaaaggatgtctgtccatctaacaagctcaggggtttctgagtctcagaatgacatcccatttcaaaaagaagaaaagagatattgaaatcattctgcctgtttgagagatgactggttatttacagcacaaaaaaaggcttagaatgaaaactagaagaggccttttgtttttcactcccagtgaggagagtagaaatcttaagatgctctactgggctacctgtagcactgactggagtttgctgcctacagagttttgaatgtactagtccttagtttccatagaactgaatgcacctctttagtaagttgctgatttatggtgctaaagaaaatgattattcccatttttttcttcttccccaagccccttaagcatttaagaaaatttaaaataaaagcgttagaggccctttttatgaatgtaacctaagtttctgtttgacatatgacactgcaacttaaaaatgttaggaaattatttgcctttttttttcttttagagttaagctttataaataatctgtagaatcaattgaagtttaaagcttaaggatcactcttaagacgtctacaaaatcttgtatatttttaagtgtgccaatttgtaacatattttgtaagtgtatatttttcttagaaaagtgctgtgaagtgtctgtatgtgagagttttcctttttctgcaccactaggtgctaataaaaggatatttacttcaaagtttctggttttagaaaccacaatacaaagaaaaaaaatacacttttgttggaaattttgtaacacaaaacatgttgtgaaagagtgtagtgatcttgtgcaaaaaaaatgaacatttgtgagcttcttgctgttttatagattttcttgtaaattattcttgtaacacttctggttttgttgttcttgttgcgaaggtttcaaatatttgtgactgaatgtacggtgaaactgtcataatgttacctagctgagttttgttattgtttatgaaataaataaaaagaaaagttt

SEQ ID NO: 57127 - DNA, 4733 bp, Homo Sapiens
agtctaggcctccgcctccgttaccctggagcccaggttaccgccgctgccacccaggagccccgatcctcgcctctgtcccatccttgtgttcaaacctcccgcatctcggcaacctcggcacccgcccggcagcctccgcaggaaccaggcacccgctctttggcggtcagacgccgaggccccagctgggagtttggtcctaagagggaaggcaaggaggcgggacgccgcatcggctctgctgaagagcctgcgggttggaggtgggctttgaagtgggcgtggagacggcgggggaggtggaggtgcgagtataaatgatcaaccagaaattatcttcaaaggaataaaaccagaagtatgtaaataaaaagcccaagataaagaaacagaaaagctgacactacatgaagcagagggcaaaaaagtttatcttctggatgccaatgtgaattgtggtctacaaatacattgtggagaaaatagattgcacagaaatgaatattatcaggatctgaagactgtgaaaatgtttttcagtattgtcgtagtctcctctggagaaaataatctgtgaaattatgtgaatagagaccatttttcaaaacaatgggggaaagagcaggaagtccaggtactgatcaagaaagagaggcaggcaaacaccattattcttactcatctgattttgaaacgccacagtcttctggccgatcatcgctggtcagttcttcacctgcaagtgttaggagaaaaaatcctaaaagacaaacttcagatggccaagtacatcaccaagcccctcggaaaccaagccctaagggtctaccaaacagaaagggagtccgagtgggatttcgctcccagagcctcaatagagagccacttcggaaagatactgatcttgttacaaaacggattctgtctgcaagactgctaaaaatcaatgagttgcagaatgaagtatctgaactccaggtcaagttagctgagctgctaaaagaaaataaatctttgaaaaggcttcagtacagacaggagaaagccctgaataagtttgaagatgccgaaaatgaaatctcacaacttatatttcgtcataacaatgagattacagcactcaaagaacgcttaagaaaatctcaagagaaagaacgggcaactgagaaaagggtaaaagatacagaaagtgaactatttaggacaaaattttccttacagaaactgaaagagatctctgaagctagacacctacctgaacgagatgatttggcaaagaaactagtttcagcagagttaaagttagatgacaccgagagaagaattaaggagctatcgaaaaaccttgaactgagtactaacagtttccaacgacagttgcttgctgaaaggaaaagggcatatgaggctcatgatgaaaataaagttcttcaaaaggaggtacagcgactatatcacaaattaaaggaaaaggagagagaactggatataaaaaatatatattctaatcgtctgccaaagtcctctccaaataaagagaaagaacttgcattaagaaaaaatgctgcatgccagagtgattttgcagacctgtgtacaaaaggagtacaaaccatggaagacttcaagccagaagaatatcctttaactccagaaacaattatgtgttacgaaaacaaatgggaagaaccaggacatcttactttggacttgcaatctcaaaagcaagacaggcatggagaagcagggattctaaacccaattatggaaagagaagaaaaatttgttacagatgaagaactccatgtcgtaaaacaggaggttgaaaagctggaggatgaatgggaaagagaagaacttgataaaaagcaaaaagaaaaggcatctttactggaaagagaagaaaagccagagtgggaaactggaaggtaccaactaggaatgtatccaattcagaatatggataaattgcaaggagaggaagaagaaagactgaagagagaaatgctacttgctaaactgaatgaaattgacagagaactccaagattctcgaaatctaaaataccctgttttgccattgttacctgattttgaatcaaaactacactcccgagagagaagccccaaaacatacaggttctctgaatcctcagagagattatttaatgggcatcatttgcaagacatcagtttctcaactccaaaaggagaaggtcagaattcaggaaatgttagaagtccagcctcccctaatgagttcgcatttggtagctacgtgccttcgtttgcaaaaacatcagagaggtcaaatccatttagtcaaaaaagtagttttttggatttccaaagaaacagtatggaaaaacttagtaaagatggtgtagatttaattacaagaaaagagaaaaaagctaatttgatggaacagttatttggtgccagtggtagcagcaccatttcctccaaaagcagtggcccaaattctgtggcttccagtaaaggagacattgaccctctaaattttctccctgggaataaaggcagcagagatcaagaacatgatgaagatgaaggctttttcctcagtgaaggaagaagttttaatccaaataggcaccgattaaaacatgcagacgataaaccagcagtaaaagcagctgattctgtagaagatgaaattgaagaagtagcactgagatgactgactagagtatacattttttctaattgtaaatattgaaatattttaatacagtatttattataaacatttagactttttaatgctaaaatgtccttattaaggaatgatttttaatagctaaatacaatgcagttaaaaagaagtagatcatacatacaccacatagatagtttgccaagaatgaaggaggcttttttgaatgaaaccaaaaataaaaatatgtcttgaaaaatgaaatagattttaactcttcatccagtgctatggcaagtttaactgcactggaggtggtattccttttctacttttattcctatttatgtatttatttttaatcatattctcactgtgctaaatacagtcttcccactaattgttgaatgaaaattaagggtgaaagtctgtgttgggaagtgtagctccggatggtggagaaccagtgcttcttaggagcccttccctttatggatagggccaggggtccctatcttacgtggcagtcctaagctactcttgagtgatagcagtcacaacattgggatttcccattcctctgaaagtacccacagctaaacactactcatttcccaatttcagtatttactgaaatcacttacctacaattctgttaggatattatgttgagttcggaagacatttctctgtttgcaaggacagttagttgctctctgtcatagcccgcagaagcttggctacagtgtaattcctctccttgttctcctacactctttgtatctcagtgactgggtgtaagatttcatgccaaatgcaaggaatagtggaaatacataccaactgcaaagaatagaaaaactttatcccaatatattatagaaagatcttcagttcaattatgtccagagtaatataatttggcaatgttaatgcttttaagatttgaacttgtcctcaaaccaaggagacaacaatagtgtaatactattggacttacaggattagttttaaagcaactttgaatagaagtgtttcagacataggacttctgccttgttgactagagtggatagttttctgtttaaatgcattggtcttttggctgtttgtaattcacttcagcttatagagaagttgatgaccttggatcatgctgggtatgattggtctttaaaaagcaataatataccaccagcccaaggagaaaacattgttaaaatgaagagtggtggaaatagtgtgttgggaagaataaaaaatttagattggcacttattctaaagtgagctgtttttttcaagaatttactagcatttgctcgtagtatgatttctgacgccagtcatatatactgatgaggggaaggagttactgtgttattctgagttcttataaatgcatattattgaatttcattgcatgactatttgtcaagacttacctggttaggtctccaattaaaagatgtaccacctgtcatcttctaaattgtgttcctttcatttattgggaacagaatctctcaaaagtgctaaactatattaaaaagttttcttaatagatttgtatgtctgatatgtataaccatttactataatatgttgcaaatcattctaatatatgtaaaacaatattatttgtaatgcagttattggtaaaatattatgtaatgttaattttgttcctagctgctaatttttctgccaaaagtattctaattttcaggttgttttaaaggcttttaaaactttttagttaagttttttattcacgtcatttaaattagttttttgctttttttctacctgataatctctttaacaagatgcaacaagacagaattattaaaattaaacctaaagttaagttacagatttaaaggcattatgatattaagcattaaaattggagattaaaatgtacaaaacagggttttccttatgaacaaaccttacagggtaaattgtttttttttctaaatgtcattaaatttatttgtactcagaactgttactaataaaaattaaaaatgcaaaaaaaaaaaaaaa

SEQ ID NO: 57128 - DNA, 5909 bp, Homo Sapiens
ctttctttctccctcctctcctccatttgttgtttgatgtttcccactctttgaggaaggatggttgatttggagagcgaagtgccccctctgcctcccaggtacaggtttcgagatttgctgctaggggaccaaggatggcaaaacgacgacagggtacaagttgaattctatatgaatgaaaatacatttaaagaaagactaaaattatttttcataaaaaaccagagatcaagtctaaggatacgcctgttcaatttttctctcaaattactaagctgcttattatacataatccgagtactactagaaaacccttcacaaggaaatgaatggtctcatatcttttgggtgaacagaagtctacctttgtggggcttacaggtttcagtggcattgataagtctgtttgaaacaatattacttggttatcttagttataagggaaacatctgggaacagattttacgaatacccttcatcttggaaataattaatgcagttcccttcattatctcaatattctggccttccttaaggaatctatttgtcccagtctttctgaactgttggcttgccaaacatgccttggaaaatatgattaatgatctacacagagccattcagcgtacacagtctgcaatgtttaatcaagttttgattttaatatctacattactatgccttatcttcacctgcatttgtgggatccaacatctggaacgaataggaaagaagctgaatctctttgactccctttatttctgcattgtgacgttttctactgtgggcttcggggatgtcactcctgaaacatggtcctccaagctttttgtagttgctatgatttgtgttgctcttgtggttctacccatacagtttgaacagctggcttatttgtggatggagagacaaaagtcaggaggaaactatagtcgacatagagctcaaactgaaaagcatgtcgtcctgtgtgtcagctcactgaagattgatttacttatggattttttaaatgaattctatgctcatcctaggctccaggattattatgtggtgattttgtgtcctactgaaatggatgtacaggttcgaagggtactgcagattccaatgtggtcccaacgagttatctaccttcaaggttcagcccttaaagatcaagacctattgagagcaaagatggatgacgctgaggcctgttttattctcagtagccgttgtgaagtggataggacatcatctgatcaccaaacaattttgagagcatgggctgtgaaagattttgctccaaattgtcctttgtatgtccagatattaaagcctgaaaataaatttcacatcaaatttgctgatcatgttgtttgtgaagaagagtttaaatacgccatgttagctttaaactgtatatgcccagcaacatctacacttattacactactggttcatacctctagagggcaagaaggccagcaatcgccagaacaatggcagaagatgtacggtagatgctccgggaatgaagtctaccacattgttttggaagaaagtacattttttgctgaatatgaaggaaagagttttacatatgcctctttccatgcacacaaaaagtttggcgtctgcttgattggtgttaggagggaggataataaaaacattttgctgaatccaggtcctcgatacattatgaattctacagacatatgcttttatattaatattaccaaagaagagaattcagcatttaaaaaccaagaccagcagagaaaaagcaatgtgtccaggtcgttttatcatggaccttccagattacctgtacatagcataattgccagcatgggtactgtggctatagacttgcaagatacaagctgtagatcagcaagtggccctaccctgtctcttcctacagagggaagcaaagaaataagaagacctagcattgctcctgttttagaggttgcagatacatcatcgattcaaacatgtgatcttctaagtgaccaatcagaagatgaaactacaccagatgaagaaatgtcttcaaacttagagtatgctaaaggttacccaccttattctccatatataggaagttcacccactttttgtcatctccttcatgaaaaagtaccattttgctgcttaagattagacaagagttgccaacataactactatgaggatgcaaaagcctatggattcaaaaataaactaattatagttgcagctgaaacagctggaaatggattatataactttattgttcctctcagggcatattatagaccaaagaaagaacttaatcccatagtactgctattggataacccgccagatatgcattttctggatgcaatctgttggtttccaatggtttactacatggtgggctctattgacaacctagatgacttactcaggtgtggagtgacttttgctgctaatatggtggttgtggataaagagagcaccatgagtgccgaggaagactacatggcagatgccaaaaccattgtgaacgtgcagacactcttcaggttgttttccagtctcagtattatcacagagctaactcaccccgccaacatgagattcatgcaattcagagccaaagactgttactctcttgctctttcaaaactggaaaagaaagaacgggagagaggctctaacttggcctttatgtttcgactgccttttgctgctgggagggtgtttagcatcagtatgttggacactctgctgtatcagtcatttgtgaaggattatatgatttctatcacgagacttctgttgggactggacactacaccaggatctgggtttctttgttctatgaaaatcactgcagatgacttatggatcagaacttatgccagactttatcagaagttgtgttcttctactggagatgttcccattggaatctacaggactgagtctcagaaacttactacatctgagtctcaaatatctatcagtgtagaagagtgggaagacaccaaagactccaaagaacaagggcaccaccgcagcaaccaccgcaactcaacatccagtgaccagtcggaccatcccttgctgcggagaaaaagcatgcagtgggcccgaagactgagcagaaaaggcccaaaacactctggtaaaacagctgaaaaaataacccagcagcgactgaacctctacaggaggtcagaaagacaagagcttgctgaacttgtgaaaaatagaatgaaacacttgggtctttctacagtgggatatgatgaaatgaatgatcatcaaagtaccctctcctacatcctgattaacccatctccagataccagaatagagctgaatgatgttgtatacttaattcgaccagatccactggcctaccttccaaacagtgagcccagtcgaagaaacagcatctgcaatgtcactggtcaagattctcgggaggaaactcaactttgataaaaataaaatgagaaacttttttcctacaaagaccttgcttgaaaccacaaaagttttgctggcacgaaagaaactagatggaaatatatgtaattctctcatatttaaaaacgtaatctcttctcttagaagtatagatcattttgaaacttaatgtactacttactggtactctccctattaatatttgaaggacctcaatggaataaatttgaaaagctaaattaaaatacaaaaatttaaatctgacatttaattgttttataataatccaaactctatgaaagcaattttaaaaattattaaggttttatgaagttgacaaaatctaactatatttggtgcatcacaatggacacagaatgctgctgctcctcttaaaaattaaatgtgtcatattatattctttaaacttactgttttacaaaattgagctcatcgtaaatgtctagtcttctcacatagagattaaccaacaaacttgtgtggctgacttttgtgtaagaatcatagtttgctttagaatacaaatctttaagtcattttaacttttttttctgccttacgatataaaaatatttatcttagaatttgagatgttcatagcatgttttattacattgaagaaactaaaacataaatgaaaagaaacactaggttcctgcactttttggtaactttatgtctagcaaatattttatgccaagaaaagcatactataaagcaaatatctattattctcctaaacgaatgcctagcatagagaaaatacttaatacacatttgttgacttaaatttaattcaaggattgaaaaattaactggatatcttgaaatatacagtaatgattgtccttagactcttgaactttaccatctttcctattcatatatctatatagtaaatttcactagaaaaattcttttaaaattgacagaagataatttataccttttatggactctgaagacacttcaaaacattaaaagtccttatgtctttggtaatgaaacaataacactcaatgaaggatgtattaaaatttttgacttaattttgaaatcgtatatatgagctatactttaacattatgagagaaaagcataaaacaaaaataggtagttcttggcttttaacattaatgcaaatcatgcagaatttgagttataaatttaaatataaattgaccattgatgatatccagtttttcattttttacctgtattgcattttccccctagagaaatagatcaaaagagcacaagagtatgcgtacatagtttaccaggtagtagaagtgtgttaaaatgttcctgtaaaagaaacattggtaaatttaaatacatactgttctaattttgtattttttaatttttgaatttgacattgagtttaattcagcaacaacaaaaaatacatataaaactagaaagggactttttttcctttcttttcataatgaagcagatcaacttaaaggataataaaatttttaaagaaaagatattctaatgtactctcaataattctacagaaataaaactgtaaagtgcaatgtgaaatcaaagattatagtcattgtataatttggcttggaggctatgaaatgtctttttttctttttggtattttacattattcacattttagaataacaagaacaccaagaattacccctaaaacagagaccctgtatttaatctactttgatcagagaagtagaatttataacaggttagctaaaattgggagcatgccttaaaacttaaagattgtatgcatatatgtgtatatgttataaacgtgaaatatatttgacacacacattcacatataaattgttaaaaactgaaggcagaatggaactaatatatgtaacagagaaaaacaataaattttatgaacttgttttatatttgcatatcaagagtcaagtatgatgtttctttaagttgactttttttacttcattatttttaggaataaatgtaagattttacaaatcttttatttccccacaagatctgaagtttggtatttttgcattatgacagttgttgagactaggattttaagctaggatatgattatatttcctatataactaaaaattttgtttcataaattttaaaataattatttttgactatgaacattagtccaaatttaatatttgacacagttcataccagcttgctacaataatgataatttattagtctttctgttatttaaagaataaaaacatgcttataaaagacttttaatgaaatgttgcctttttaaaataattatacttgcacatgaaaataaaatataaagtcaataatagtccttgtagcccaatgggaattgattctgtttattgtctgtaccattttgctaccagttacattgaactgctttaaaataaataataaaattatttctaatgatg

SEQ ID NO: 57129 - DNA, 2174 bp, Homo Sapiens
cgtgatctcgggtttgtcgggctgaaatgtggcgggtctcggaaggttccgacctcagtaaagagagctaacgtgtattcttctttttcttagatgctgagatgaatcgtcacctgtgtgtttggctttttagacatccatctcttaatggttacctccagtgtcacatccagctccattctcatcaatttagacagatacatcttgatacaaggctgcaagtttttagacaaaacaggaattgcattcttcatctgttaagtaagaattggtccaggagatattgccatcaagacaccaagatgctctggaagcataaagcactacagaaatatatggagaacctgagtaaggagtaccaaacacttgagcaatgtctgcagcatatccctgtgaatgaggaaaaccgaaggtccttgaacagaaggcatgctgagttggcacctcttgcagccatttaccaagaaattcaggagactgaacaagcaattgaagaattagaatcaatgtgtaaaagcctaaataaacaagatgaaaagcagttacaagaacttgcactggaagaaaggcaaaccattgatcaaaaaatcaacatgttgtacaatgagcttttccagagccttgtgccaaaggagaaatatgacaaaaatgatgttattttagaggtgacagctggaaggactactggaggtgacatctgccaacaatttacccgagaaatatttgacatgtaccagaattattcgtgctataaacactggcaatttgaacttctgaattatacaccagcagattatggtggactacatcatgcagccgcccgaatttccggtgacggtgtctataagcatttgaagtatgagggtgggattcaccgagttcagcgcatccccgaggtgggcctgtcctcaaggatgcagcgcattcacacaggaacgatgtcggttattgtccttcctcagccagatgaggtggatgtgaaattggaccccaaggatttgcgaatagatacatttcgagccaaaggagcaggagggcagcatgttaataaaactgatagtgccgtcagacttgtccacatccccacagggctagtagtagaatgccaacaagaaagatcacagataaaaaataaagaaatagcctttcgtgtgttgagagctagactctaccagcagattattgagaaagacaagcgtcagcaacaaagtgctagaaaactgcaggtgggaacaagagcccagtcagagcgaattcggacatataatttcacccaggatagagtcagtgaccacaggatagcatatgaagttcgtgatattaaggaatttttatgtggtgggaagggcctggatcagctaattcagagactgcttcaatcagcagatgaagaagccattgctgaacttttggatgaacaccttaaatcagcaaaataaatactaacttattattatttatgattatataaatgaaatggacctatatcaagaggcagactgaagcttggaaatcattatgaatatttgtaaattacagctttaagaacacattacacataaatatatgttttgtaattaatcgaagtcacatttcctgacctaagaatttattttaggtttcctgtaaagtacaatccaactcatcaagtagaaaataagcatgcatcattgaaaagagaaagtattgagaattgattgtgtcatttaggacaagtcacttgttctctttatatgccttttttccccagccatctatgaattaatttaaatatatttttaatctactacttcaggaaaatatggtaaaatttagtaaaatatgaattttagacttccttataaaccttttatttaaatacaaagtaccttggcctatagtggatgcttatgcctgtaatcccagtgctttgaagggccaaagggggaagatctcttgaggtaagaatttgagaccagcctgggcaaaatagaccccatgtctacaaaaaaactcaaaacataaagaaaaaccataatactgttaatcatgttaaagttaagacttagactgcaacttttaaataaaaattatgaagaatatgagtcattcaataacaatgagcatctgggtacagacagtaaagccctttgattgctgtatgaattccacactatataaacaataagctgata

SEQ ID NO: 57130 - DNA, 5355 bp, Homo Sapiens
ggccggggctgtcgcgggttggggcggttgggctggcagctgaggctcgtggccatggagtggggttctgagtcggctgctgtgaggcggcaccgcgtcggagtagagcgtcgagagggagcggcggccgcgccaccgccggagagggaggcccgagcgcaggagcctctggtggatgggtgcagcggcggcgggaggacgcggaagaggagccccgggggtagcggcggcgcgagcaggggcgcggggaccgggctgtctgaggtgcgcgccgcgctggggctcgcgctctacctgatcgcgctgcggacgctggtgcagctctcgctgcagcagctcgtgctacgcggggccgctggacaccgcggggagttcgacgcgctccaagccagggattatcttgaacacataacctccattggccccaggactacaggaagtccagaaaatgaaattctgaccgtgcactaccttttggaacagattaaactgattgaagtgcaaagcaacagccttcataagatttcagtagatgtacaacggcccacaggctcttttagcattgatttcttgggaggttttacaagctattatgacaacatcaccaatgttgtggtaaagctggaacccagagatggagcccagcatgctgtcttggctaattgtcattttgactcagtagcaaactcaccaggtgccagtgatgatgcagttagctgctcagtgatgctggaagtccttcgcgtcttgtcaacatcttcagaagccttgcatcatgctgtcatatttctctttaatggtgctgaggaaaatgtcttgcaagccagtcatggtttcattactcagcacccctgggctagcttgattcgtgcattcattaacctagaggcagcaggtgtaggagggaaagaacttgtattccaaacaggtcctgaaaatccttggttggttcaagcttatgtttcagcagctaaacacccttttgcttctgtggtggctcaggaggtttttcagagtggaatcattccttcagatactgactttcgtatctacagggattttgggaacattccaggaatagacttagcttttattgagaatggatacatttatcacaccaagtatgacacagcggacagaattctaacagattccattcagagagcaggtgacaacattttagcagttcttaagcatctagctacatctgatatgctggctgctgcttctaagtatcgacatggaaacatggtcttctttgatgtgctgggcctgtttgtcattgcctacccctctcgtattggctcaatcataaactacatggtggtaatgggtgttgttttgtacctgggcaaaaaatttttgcagcccaaacataagactggtaactacaagaaggacttcttgtgtggacttggcatcactttgatcagctggttcactagccttgttaccgttctcattatagcagtgttcatctctcttattggacagtctctctcatggtataaccacttctatgtctccgtttgtctgtatggaactgcaactgtagccaaaataatacttatacatactcttgcgaaaagattttattacatgaatgccagtgcccagtatctgggagaagtattttttgacatttcgctgtttgtccattgctgttttcttgttaccctcacttaccaaggactttgctcggcgtttattagtgctgtctgggtagcattcccattgctcacaaagctctgtgtgcataaggacttcaagcagcatggtgcccaaggaaaatttattgctttttaccttttggggatgtttattccttatctttatgcattgtacctcatctgggcagtatttgagatgtttacccctatcctcgggagaagtggttctgaaatcccacctgatgttgtgctggcatccattttggctggctgtacaatgattctctcgtcctattttattaacttcatctaccttgccaagagcacaaaaaaaaccatgctaactttaactttggtatgtgcaattacattcctccttgtttgcagtggaacattttttccatatagctccaatcctgctaatccgaagccaaagagagtgtttcttcagcatatgactagaacattccatgacttggaaggaaatgcagttaaacgggactctggaatatggatcaatgggtttgattatactggaatttctcacataacccctcacattcctgagatcaatgatagtatccgagctcactgtgaggagaatgcacctctttgtggttttccttggtatcttccagtgcactttctgatcaggaaaaactggtatcttcctgccccagaagtttctccaagaaatcctcctcatttccgactcatatccaaagaacagacaccttgggattctataaaattgacttttgaagcaacaggaccaagccatatgtccttctatgttcgagcccacaaagggtcaacactttctcagtggtctcttggcaatggcaccccagtcacaagtaaaggaggagactactttgtcttttactcccatggactccaggcctctgcatggcagttctggatagaagtgcaggtttcagaagaacatcctgaaggaatggtcaccgtggccattgctgcccactatctgtctggggaagacaagagatcccctcaactggatgctctgaaggaaaagttcccagattggacatttccctctgcctgggtgtgcacctacgatctctttgtattttaatcttgtggatgagctctaagtacatgcccagtggatactccatgtgacatggtttctccctatgttacgtggatgtttgtaacgtaagtcaatgaattttaatgatcatatgttcaaagagctttctgggttaacgcttttcagggccaagcactataagggtttagctgtggcgcagtgatgcatggcctgttgacacttgaaaatgccagtcttttggcacttcagcacatgtgggtactgccactacacacacgtcattttatatgaccttaaggacaaagccaacaatccacttcaatagctgcccctttaggatcaagaaagatgtacactgtcagagcattgttaatgagacaaaagttgtttccaatttaagccccaaaaccatttgttgtattagtggatggtgggtaaaatatcattcactgaggtaatgattccccttgagaatataactctgtgtaggtcactggaaagtgattgccatagggctgggagagaagcattgcactcttgaggctgtagcctgtgtcaagctgtttcttcaggcagcctctcaaatgtgctttgtctctctgtgctgaggcctggaccctgtgctgagctggtgactcactgtcctgacaagtggacacacagatgcactgctgtgctgctttcctgaggtggttttctatgcctgttttcctctgaaacatgtctgttacccctctccatcttaccaagttgaaaaggggaatatttggccacatacccctctggttttcgtaggttcttttggttcagaatattgtttgtgccagtacatgaccttaacttccttcctcagagcactgagctgccatctgggctattctggggtagaaggaaggctgggagtggtgggaattttataaatatttattctcttttctttgtttcataggagtcttgtgttatacaaggttagtccttcatggtataatcttactgatgcactgggcctatctttttgttttccagccagttgaatagattagtttttctcagtaacttactatccagcagactggctttcctgagacttgaggttgtggcttatactggaatgagaccactgtacgtgtaggtggttcagatcctgcgtaatggcagcatgaggacttaaaaggtggttttcattttgaagatggctatgtagcttgtaaggtgtatcacagcagtacctctcatggctttttggttccagcagtgagggcattggtgagatcaatggtaaactgtgcaagctttctttttatcattaggaaatgtgaaacgttggacaaattttgagttttaacaaggacaaaaagttgaaagaaaaggcacagttaacaaaaaagggtggctagatttatcttgggtgatggaggaaatgagagaggaatgctcttgaaaggtggtctgtggatctgtctgaatagaaagagcacagtaagtatgcattgccggagaaaacgtccttgaagctgcttgtctcatgtgtatgatgtgctttttaaatcatgcccctcgttgcctgcctaatctgtgactccctaaaaactaactgggcccatgtagatggggctgcaaccagagctgaataacatgttaggctcacacatgcatcagcactgcacactggaatcattgctcttcctggactttgtagaaatcagtctcaagtgcttcaagagtctggctcctgctacttttatctgtcaggtagcacataaggtttgcagggtttatattttgtatagaatcacagttgtggagaaaaagtaataatttctcaatgaattttaaaaatgggcctattttctatccccgtggttcatctgatataattagtgttccctgtgaattccccccctctatgggaaggatgcctttactctttatcagtaataaattatgactgttttcatattgccttagggttatttccctgtgtaaaccattgtcttttgttttggttttctttagcattatgaagctttggtattgtacaaggtcagtagtaagatgctcactagtctcagggcttgtgtaatattctgggaggtcatttaaatgccagaaatggtcaagcaattatacacagtatttatgactctgttaagcataccgtttgtctgtcacattagtagattctgagattaaaaaaaatttttaaagagtgatcatttaaataatttctaaaagggtcttttcaagctctaacaaagtcactaacaaatgcattattttctacagaattagatgttagtagtacagtactgcatattcagggaaaaagtgtgaggaattgatttcaaaatagttcgttcttgtgtttgacctaagaatgattgtcgcatgaagtgtttgtttttacagtttagcatatataaacaaacatgataggattccttaagatgttaccacccagggggccacaagccagcctgctgtctcaggaagctgtagaaggagtgtttgtcaatttcttgtcactggtttgctgacttactgaggattaattgttgccttacaatgttactgaaataaactgtttaatataaaaaaaaaaaaaaa

SEQ ID NO: 57131 - DNA, 8035 bp, Homo Sapiens; identical to SEQ ID NO: 22464

SEQ ID NO: 57132 - DNA, 2580 bp, Homo Sapiens
cccggagctaaggcgccgaacccgcggcgcgtggggacgatgtggttctttgcccgggacccggtccgggactttccgttcgagctcatcccggagcccccagaggcggcctgcccgggccctgggccctgcaccgcggccgcaagaagggccacaggcagccccgtgtccatcttcgtctatgatgtgaagcctggcgcggaagagcagacccaggtggccaaagctgccttcaagcgcttcaaaactctacggcaccccaacatcctggcttacatcgatggactggagacagaaaaatgcctccacgtcgtgacagaggctgtgaccccgttgggaatatacctcaaggcgagagtggaggctggtggcctgaaggagctggagatctcctgggggctacaccagatcgtgaaagccctcagcttcctggtcaacgactgcagcctcatccacaacaatgtctgcatggccgccgtgttcgtggaccgagctggcgagtggaagcttgggggcctggactacatgtattcggcccaggcaaccggtgggggacctccccgcaaggggatccccgagcttgagcagtatgaccccccggagttggctgacagcagtggcagagtggtcagagagaagtggtcagcagacatgtggcgcttgggctgcctcatttgggaagtcttcaatgggcccctacctcgggcagcagccctacgcaaccctgggaagatccccaaaacgctggtgccccattactgtgagctggtgggagcaaaccccaaggtgcgtcccaacccagcccgcttcctgcagaactgccgggcacctggtggcttcatgagcaaccgctttgtagaaaccaacctcttcctggaggagattcagatcaaagagccagccgagaagcaaaaattcttccaggagctgagcaagagcctggacgcattccctgaggatttctgtcggcacaaggtgctgccccagctgctgaccgccttcgagttcggcaatgctggggccgttgtcctcacgcccctcttcaaggtgggcaagttcctgagcgctgaggagtatcagcagaagatcatccctgtggtggtcaagatgttctcatccactgaccgggccatgcgcatccgccttctgcagcagatggagcagttcatccagtaccttgacgagccaacagtcaacacccagatcttcccccacgtcgtacatggcttcctggacaccaaccctgccatccgggagcagacggtcaagtccatgctgctcctggccccaaagctgaacgaggccaacctcaatgtggagctgatgaagcactttgcacggctacaggccaaggatgaacagggccccatccgctgcaacaccacagtctgcctgggcaaaatcggctcctacctcagtgctagcaccagacacagggtccttacctctgccttcagccgagccactagggacccgtttgcaccgtcccgggttgcgggtgtcctgggctttgctgccacccacaacctctactcaatgaacgactgtgcccagaagatcctgcctgtgctctgcggtctcactgtagatcctgagaaatccgtgcgagaccaggccttcaaggccattcggagcttcctgtccaaattggagtctgtgtcggaggacccgacccagctggaggaagtggagaaggatgtccatgcagcctccagccctggcatgggaggagccgcagctagctgggcaggctgggccgtgaccggggtctctcactcacctcaagctgatccgttcgcacccaaccactgcccaacagaaaccaacattccccaaagacccacgctgaaggagttcctgccccagccccccacccctgttcctgccacccctacaacctcaggccactgggagacgcaggaggaggacaaggacacagcagaggacagcagcactgctgacagatgggacgacgaagactggggcagcctggagcaggaggccgagtctgtgctggcccagcaggacgactggagcaccgggggccaagtgagccgtgctagtcagagtccgactggagcagctgggaagctgagggctcctgggaacagggctggcaggagccaagctcccaggagccacctcctgacggtacacggctggccagcgagtataactggggtggcccagagtccagcgacaagggcgaccccttcgctaccctgtctgcacgtcccagcacccagccgaggccagactcttggggtgaggacaactgggagggcctcgagactgacagtcgacaggtcaaggctgagctggcccggaagaagcgcgaggagcggcggcgggagatggaggccaaacgcgccgagaggaaggtggccaagggccccatgaagctgggagcccggaagctggactgaaccgtggcggtggcccttcccggctgcggagagcccgccccacagatgtatttattgtacaaaccatgtgagcccggccggcccagccaggccatctcacgtgtacataatcagagccacaataaattctatttcacaaaaaaaaaaaaaaaaa

SEQ ID NO: 57133 - DNA, 4086 bp, Homo Sapiens
aatggagccgctgtcagcagaaccttctgccgccgccgccgccgccgccgtccctcctcttttttttcccggcagatctttgttgtgtgggagggcagcagggatggacttgagcttgcggatcccctgctagagcagccgcgctcggagaaggcgccgcagccgcgaggaggagccgccgccgccgcgcccgaggccccgccgcccgcggcctctgtcggcccgcgccccgctcgccccgtcgccccgtcgcccctcgcctccccgcagagtcccctcgcggcagcagatgtgtgtggggtcagcccacggcggggactatggtgaaattcccggcgctcacgcactactggcccctgatccggttcttggtgcccctgggcatcaccaacatagccatcgacttcggggagcaggccttgaaccggggcattgctgctgtcaaggaggatgcagtcgagatgctggccagctacgggctggcgtactccctcatgaagttcttcacgggtcccatgagtgacttcaaaaatgtgggcctggtgtttgtgaacagcaagagagacaggaccaaagccgtcctgtgtatggtggtggcaggggccatcgctgccgtctttcacacactgatagcttatagtgatttaggatactacattatcaataaactgcaccatgtggacgagtcggtggggagcaagacgagaagggccttcctgtacctcgccgcctttcctttcatggacgcaatggcatggacccatgctggcattctcttaaaacacaaatacagtttcctggtgggatgtgcctcaatctcagatgtcatagctcaggttgtttttgtagccattttgcttcacagtcacctggaatgccgggagcccctgctcatcccgatcctctccttgtacatgggcgcacttgtgcgctgcaccaccctgtgcctgggctactacaagaacattcacgacatcatccctgacagaagtggcccggagctggggggagatgcaacaataagaaagatgctgagcttctggtggcctttggctctaattctggccacacagagaatcagtcggcctattgtcaacctctttgtttcccgggaccttggtggcagttctgcagccacagaggcagtggcgattttgacagccacataccctgtgggtcacatgccatacggctggttgacggaaatccgtgctgtgtatcctgctttcgacaagaataaccccagcaacaaactggtgagcacgagcaacacagtcacggcagcccacatcaagaagttcaccttcgtctgcatggctctgtcactcacgctctgtttcgtgatgttttggacacccaacgtgtctgagaaaatcttgatagacatcatcggagtggactttgcctttgcagaactctgtgttgttcctttgcggatcttctccttcttcccagttccagtcacagtgagggcgcatctcaccgggtggctgatgacactgaagaaaaccttcgtccttgcccccagctctgtgctgcggatcatcgtcctcatcgccagcctcgtggtcctaccctacctgggggtgcacggtgcgaccctgggcgtgggctccctcctggcgggctttgtgggagaatccaccatggtcgccatcgctgcgtgctatgtctaccggaagcagaaaaagaagatggagaatgagtcggccacggagggggaagactctgccatgacagacatgcctccgacagaggaggtgacagacatcgtggaaatgagagaggagaatgaataaggcacgggacgccatgggcactgcagggacagtcagtcaggatgacacttcggcatcatctcttccctctcccatcgtattttgttcccttttttttgttttgttttggtaatgaaagaggccttgatttaaaggtttcgtgtcaattctctagcatactgggtatgctcacactgacggggggacctagtgaatggtctttactgttgctatgtaaaaacaaacgaaacaactgacttcatacccctgcctcacgaaaacccaaaagacacagctgcctcacggttgacgttgtgtcctcctcccctggacaatctcctcttggaaccaaaggactgcagctgtgccatcgcgcctcggtcaccctgcacagcaggccacagactctcctgtcccccttcatcgctcttaagaatcaacaggttaaaactcggcttcctttgatttgcttcccagtcacatggccgtacaaagagatggagccccggtggcctcttaaatttcccttccgccacggagttcgaaaccatctactccacacatgcaggaggcgggtggcacgctgcagcccggagtccccgttcacactgaggaacggagacctgtgaccacagcaggctgacagatggacagaatctcccgtagaaaggtttggtttgaaatgccccgggggcagcaaactgacatggttgaatgatagcatttcactctgcgttctcctagatctgagcaagctgtcagttctcacccccaccgtgtatatacatgagctaacttttttaaattgtcacaaaagcgcatctccagattccagaccctgccgcatgacttttcctgaaggcttgcttttccctcgcctttcctgaaggtcgcattagagcgagtcacatggagcatcctaactttgcattttagtttttacagtgaactgaagctttaagtctcatccagcattctaatgccaggttgctgtagggtaacttttgaagtagatatattacctggttctgctatccttagtcataactctgcggtacaggtaattgagaatgtactacggtacttccctcccacaccatacgataaagcaagacattttataacgataccagagtcactatgtggtcctccctgaaataacgcattcgaaatccatgcagtgcagtatatttttctaagttttggaaagcaggttttttcctttaaaaaaattatagacacggttcactaaattgatttagtcagaattcctagactgaaagaacctaaacaaaaaaatattttaaagatataaatatatgctgtatatgttatgtaatttattttaggctataatacatttcctattttcgcattttcaataaaatgtctctaatacaatacggtgattgcttgtgtgctcaacatacctgcagttgaaacgtattgtatcaatgaacattgtaccttattggcagcagttttataaagtccgtcatttgcatttgaatgtaaggctcagtaaatgacagaactatttttcattatgggtaactggggaataaatgggtcactggagtaggaatagaagtgcaagctggaaaggcaaaaatgagaaagaaaaaggcaggccctttgtgtctaccgttttcagtgctgtgtgatcatattgttcctcacagcaaaaaagaatgcaagggcataatgttagctgtgaacatgccagggttgcattcacattcctgggtacccagtgctgatggggtgtgcccacgtggggacatgtccttggcgtgcttcctcagagtggcttttcctccattaatacatatatgagtactgaaaaattaagttgcatagctgctttgcagtggtttcagaggcagatctgagaagattaaaaaaaaatctcaatgtatcagctttttttaaaggacattactagaaaattaaacagtattttttaacatgtgtgactttcatgcttctggggttggagcttaaagatccaaactgagaaagcaggccgggcatggtggctcatgcctgtaatcccaacactttgggaggccaaggagggtggatcacttaaggtcaggagtttgagaccagcctggccaacatggcaaaaccctgtctctactaaaaacataaaaattagctgggggtggtagcacatacctgtaatcccagctactcaggaggctgaggcaggagaatttgcttgatcctgggaggcagaggttgtagtgagccgagatcgcgccatcgcactccagcctgggtgacaagagcaaaactccatctc

SEQ ID NO: 57134 - DNA, 4346 bp, Homo Sapiens
gaagcgggctgggaggcgtcggcggcggcagcgcacgtggtgacgtgcgagggggtgcggcgcgagcggtcggcggcggcggaggcagtgtctcccggtcgcgcgtggaggtcggtcgctcagagctgctgggcgcagtttctccgcctgctgcttcggcgcggctgtatcggcgagcgagcgagttcccgcgagttctcggtggcgctcccccttcctttcagtctccacggactggcccctcgtccttctacttgaccgctcccgtcttccgccgccttctggcgctttccgttgggccgattcccgcccgcttcctcctgcttcccatcgaagctctagaaatgaatgtttccatctcttcagagatgaaccagattatgatgcatcattatcacagaagaaattcgtgtctatagcttttaaggacttgattacatcattttcaagcctgatagttttggaatcaccattagagcttaagacacacctgccttcatttcaaccacctgtcttcataccctgacgaagtgcaccttttaacactcctttgtccttggattacttaagagttcccagaaatacatttgccaccaacagagtagccaaatttataaggaaaaatgattcccaatggatatttgatgtttgaggatgaaaattttattgagtcttctgttgccaaattaaatgccctgaggaaaagtggccagttctgtgatgttcgacttcaggtctgtggccatgaaatgttagcacacagagcagtgctagcttgctgcagtccctatttatttgaaatctttaatagtgatagtgatcctcatggaatttctcacgttaaatttgatgatctcaatccagaagctgttgaagtcttgttgaattatgcctacactgctcagttgaaagcagataaggaattggtaaaagatgtttattctgcagcaaaaaagctgaagatggatcgagtaaagcaggtttgtggtgattatttactgtctagaatggatgttaccagctgcatctcttaccgaaattttgcaagttgtatgggagactcccgtttgttgaataaggttgatgcttatattcaggagcatttgttacaaatttctgaagaggaggagtttcttaagcttccaaggctaaagttggaggtaatgcttgaagataatgtttgcttgcccagcaatggcaaattatatacaaaggtaatcaactgggtgcagcgtagcatctgggagaatggagacagtctggaagagctgatggaagaggtttattaacaaaactaggatacccaagactgaagaaacaagaagaaacctcaagtgtattgacacgtaaagaagcagcagtcctgccccagttctcctaagaaaaatccgctgtgggcagagaacgatgatgatttaatggttcaaaccttgtactactcagctgatcacaagctgcttgatgggaacctactagatggacaggctgaggtgtttggcagtgatgatgaccacattcagtttgtgcagaaaaagccaccacgtgagaatggccataagcagataagtagcagttcaactggatgtctctcttctccaaatgctacagtacaaagccctaagcatgagtggaaaatcgttgcttcagaaaagacttcaaataacacttacttgtgcctggctgtgctggatggtatattctgtgtcatttttcttcatgggagaaacagcccacagagctcaccaacaagtactccaaaactaagtaagagtttaagctttgagatgcaacaagatgagctaatcgaaaagcccatgtctcctatgcagtacgcacgatctggtctgggaacagcagagatgaatggcaaactcatagctgcaggtggctataacagagaggaatgtcttcgaacagtcgaatgctataatccacatacagatcactggtcctttcttgctcccatgagaacaccaagagcccgatttcaaatggctgtactcatgggccagctctatgtggtaggtggatcaaatggccactcagatgacctgagttgtggagagatgtatgattcaaacatagatgactggattcctgttccagaattgagaactaaccgttgtaatgcaggagtgtgtgctctgaatggaaagttatacatcgttggtggctctgatccatatggtcaaaaaggactgaaaaattgtgatgtatttgatcctgtaacaaagttgtggacaagctgtgcccctcttaacattcggagacaccagtctgcagtctgtgagcttggtggttatttgtacataatcggaggtgcagaatcttggaattgtctgaacacagtagaacgatacaatcctgaaaataatacctggactttaattgcacccatgaatgtggctaggcgaggagctggagtggctgttcttaatggaaaactgtttgtatgtggtggctttgatggttctcatgccatcagttgtgtggaaatgtatgatccaactagaaatgaatggaagatgatgggaaatatgacttcaccaaggagcaatgctgggattgcaactgtagggaacaccatttatgcagtgggaggattcgatggcaatgaatttctgaatacggtggaagtctataaccttgagtcaaatgaatggagcccctatacaaagattttccagttttaacaaatttaagaccctctcaaactaacaggcttagtgatgtaattatggttagtagaggtacacttgtgaataaagagggtgggtgggtatagatgttgctaacagcaacacaaagcttttgcatattgcatactattaaacatgctgtacatactttttgggtttatttggaaaggaatgcaaagatgaaggtctgttttgtgtacttttaagactttggttattttactttttggaaaagaataaaccaagaattgattgggcacatcatttcaagaagtcccctctcctccacatttgttttgccaatttgcacattaaatgactcttccctcaaatgtgtactatggggtaaaaggggtagggtttaaagatgtagacagttgggttttttaagggccctttttcaataactggaacactctataacaaaggatacttatttaaatagatgacattgactatttttgtttttattaaaaggaagcttacatgcctaccaatatttaatcttttatgattgcctttttataactttttatattctcagcagagtgctttaccaattgaagtaaaatgtggcaggctggagttattgaagcagagtggcagtcttcagtttgcagagtaggggtctgtcttttaaactctgagtgcaaacttcagagttcttgccttggctgcagtttttttccttcaagaatgcagtactaacatttatttgagtggagttactgaacagtaacatagctgtgatttttggtatttgaaacactggttttaaatattttgacttgttgagggtatgttttatatagcaagacattatatagcagtaaaaaatggtgttttatcttctatataattcctgtttttattattaacaaaacagtcctaaatagcagccctcaattgtgaaaaaatttactttaaactacattaggttgtgaatgcaggttttatcagaactatgtttttgttcagtttatctgttcatatggataaatattggttgggatgacttggtgtctaatgtgtagtgctacacacctaacttatggggccaaaatagcatgtcctaatgcttgctgctgatttaaacacattaaaggtactttgcaggaaatccttgcaccatgggattaatatccaattgctgcttgtacactcattcattactaaaagttttgagaaatttttttttccagtaatgagcttaagaaatttgtggaaaataactcacctggcatcttacatctgaaataaggaatgatataaggtttttttttctcacagaagatgaagcacacaggaacctaatgggccaactgggatgaggtgactattctgagatgactattcagtggctaacttgggttaggaagaaaataattaggtattttctccaaatgttcactggtactctgccactttatttctctcatctgttacacaaagaaccaccaggaaagcaaatcagtttggttggtaactctgtaattcctaactatcactggtttggttctggactaaaactacattgacagattgaatttgcctaatatgatgactgtttttaatatggatctgtatgtgttctattcagcacaaggaaataaaattttagttgaggattcagcactaaaaaaaaaa

SEQ ID NO: 57135 - DNA, 2174 bp, Homo Sapiens
agaaggcccagcgccgggaaggggtttgcagctgctccgtcatcgtgcggcccgacgctatctcgcgctcgtgtgcaggcccggctcggctcctggtccccggtgcgagggttaacgcgaggccccggcctcggtccccggactaggccgtgaccccgggtgccatgaagcaggagggctcggcgcggcgccgcggcgcggacaaggcgaaaccgccgcccggcggaggagaacaagaacccccaccgccgccggccccccaggatgtggagatgaaagaggaggcagcgacgggtggcgggtcgacgggggaggcagacggcaagacggcggcggcagcggctgagcactcccagcgagagctggacacagtcaccttggaggacatcaaggagcacgtgaaacagctagagaaagcggtttcaggcaaggagccgagattcgtgctgcgggccctgcggatgctgccttccacatcacgccgcctcaaccactatgttctgtataaggctgtgcagggcttcttcacttcaaataatgccactcgagactttttgctccccttcctggaagagcccatggacacagaggctgatttacagttccgtccccgcacgggaaaagctgcgtcgacacccctcctgcctgaagtggaagcctatctccaactcctcgtggtcatcttcatgatgaacagcaagcgctacaaagaggcacagaagatctctgatgatctgatgcagaagatcagtactcagaaccgccgggccctagaccttgtagccgcaaagtgttactattatcacgcccgggtctatgagttcctggacaagctggatgtggtgcgcagcttcttgcatgctcggctccggacagctacgcttcggcatgacgcagacgggcaggccaccctgttgaacctcctgctgcggaattacctacactacagcttgtacgaccaggctgagaagctggtgtccaagtctgtgttcccagagcaggccaacaacaatgagtgggccaggtacctctactacacagggcgaatcaaagccatccagctggagtactcagaggcccggagaacgatgaccaacgcccttcgcaaggcccctcagcacacagctgtcggcttcaaacagacggtgcacaagcttctcatcgtggtggagctgttgctgggggagatccctgaccggctgcagttccgccagccctccctcaagcgctcactcatgccctatttccttctgactcaagctgtcaggacaggaaacctagccaagttcaaccaggtcctggatcagtttggggagaagtttcaagcagatgggacctacaccctaattatccggctgcggcacaacgtgattaagacaggtgtacgcatgatcagcctctcctattcccgaatctccttggctgacatcgcccagaagctgcagttggatagccccgaagatgcagagttcattgttgccaaggccatccgggatggtgtcattgaggccagcatcaaccacgagaagggctatgtccaatccaaggagatgattgacatctattccacccgagagccccagctagccttccaccagcgcatctccttctgcctagatatccacaacatgtctgtcaaggccatgaggtttcctcccaaatcgtacaacaaggacttggagtctgcagaggaacggcgtgagcgagaacagcaggacttggagtttgccaaggagatggcagaagatgatgatgacagcttcccttgagctggggggctggggaggggtagggggaatggggacaggctctttcccccttgggggtcccctgcccagggcactgtccccattttcccacacacagctcatatgctgcattcgtgcagggggtgggggtgctgggagccagccaccctgacctcccccagggctcctccccagccggtgacttactgtacagcaggcaggagggtgggcaggcaacctccccgggcagggtcctggccagcagtgtgggagcaggaggggaaggatagttctgtgtactcctttagggagtgggggactagaactgggatgtcttggcttgtatgttttttgaagcttcgattatgatttttaaacaataaaaagttctccacagtgaaaaaaaaaaaaaaaaaaaaaaaaaaa

SEQ ID NO: 57136 - DNA, 3603 bp, Homo Sapiens
ctcggcctcgggcgcggccgagcgccgcgcgagcaggagcggcggcggcggcggcggcggcgggaggaggcagcgccggcccaagatggcggacctggaggcggtgctggccgacgtgagctacctgatggccatggagaagagcaaggccacgccggccgcgcgcgccagcaagaagatactgctgcccgagcccagcatccgcagtgtcatgcagaagtacctggaggaccggggcgaggtgacctttgagaagatcttttcccagaagctggggtacctgctcttccgagacttctgcctgaaccacctggaggaggccaggcccttggtggaattctatgaggagatcaagaagtacgagaagctggagacggaggaggagcgtgtggcccgcagccgggagatcttcgactcatacatcatgaaggagctgctggcctgctcgcatcccttctcgaagagtgccactgagcatgtccaaggccacctggggaagaagcaggtgcctccggatctcttccagccatacatcgaagagatttgtcaaaacctccgaggggacgtgttccagaaattcattgagagcgataagttcacacggttttgccagtggaagaatgtggagctcaacatccacctgaccatgaatgacttcagcgtgcatcgcatcattgggcgcgggggctttggcgaggtctatgggtgccggaagcgtgacacaggcaagatgtacgccatgaagtgcctggacaaaaagcgcatcaagatgaagcagggggagaccctggccctgaacgagcgcatcatgctctcgctcgtcagcactggggactgcccattcattgtctgcatgtcatacgcgttccacacgccagacaagctcagcttcatcctggacctcatgaacggtggggacctgcactaccacctctcccagcacggggtcttctcagaggctgacatgcgcttctatgcggccgagatcatcctgggcctggagcacatgcacaaccgcttcgtggtctaccgggacctgaagccagccaacatccttctggacgagcatggccacgtgcggatctcggacctgggcctggcctgtgacttctccaagaagaagccccatgccagcgtgggcacccacgggtacatggctccggaggtcctgcagaagggcgtggcctacgacagcagtgccgactggttctctctggggtgcatgctcttcaagttgctgcgggggcacagccccttccggcagcacaagaccaaagacaagcatgagatcgaccgcatgacgctgacgatggccgtggagctgcccgactccttctcccctgaactacactccctgctggaggggttgctgcagagggatgtcaaccggagattgggctgcctgggccgaggggctcaggaggtgaaagagagcccctttttccgctccctggactggcagatggtcttcttgcagaggtaccctcccccgctgatccccccacgaggggaggtgaacgcggccgacgccttcgacattggctccttcgatgaggaggacacaaaaggaatcaagttactggacagtgatcaggagctctaccgcaacttccccctcaccatctcggagcggtggcagcaggaggtggcagagactgtcttcgacaccatcaacgctgagacagaccggctggaggctcgcaagaaagccaagaacaagcagctgggccatgaggaagactacgccctgggcaaggactgcatcatgcatggctacatgtccaagatgggcaacccctttctgacccagtggcagcggcggtacttctacctgttccccaaccgcctcgagtggcggggcgagggcgaggccccgcagagcctgctgaccatggaggagatccagtcggtggaggagacgcagatcaaggagcgcaagtgcctgctcctcaagatccgcggtgggaaacagttcattttgcagtgcgatagcgaccctgagctggtgcagtggaagaaggagctgcgcgacgcctaccgcgaggcccagcagctggtgcagcgggtgcccaagatgaagaacaagccgcgctcgcccgtggtggagctgagcaaggtgccgctggtccagcgcggcagtgccaacggcctctgacccgcccacccgccttttataaacctctaatttattttgtcgaatttttattatttgttttcccgccaagcgaaaaggttttattttgtaattattgtgatttcccgtggccccagcctggcccagctcccccgggaggccccgcttgcctcggctcctgctgcaccaacccagccgctgcccggcgccctctgtcctgacttcaggggctgcccgctcccagtgtcttcctgtgggggaagagcacagccctcccgccccttccccgagggatgatgccacaccaagctgtgccaccctgggctctgtgggctgcacttgtgccatgggactgtgggtggcccatcccccctcaccaggggcaggcacagcacagggatccgacttgaattttcccactgcaccccctcctgctgcagaggggcaggccctgcactgtcctgctccacagtgttggcgagaggaggggcccgttgtctccctggccctcaaggctcccacagtgactcgggctcctgtgcccttattcaggaaaagcctctgtgtcactggctgcctccactcccacttccctgacactgcggggcttggctgagagagtggcattggcagcaggtgctgctaccctccctgctgtcccctcttgccccaacccccagcacccgggctcagggaccacagcaaggcacctgcaggttgggccatactggcctcgcctggcctgaggtctcgctgatgctgggctgggtgcgaccccatctgcccaggacggggccggccaggtgggcgggcagcacagcaaggaggctggctggggcctatcagtgtgccccccatcctggcccatcagtgtacccccgcccagactggccagccccacagcccacgtcctgtcagtgccgccgcctcgcccaccgcatgccccctgtgccagtgctctgcctgtgtgtgtgcactcgtgtcgcgccttctcccccccggggctgggttggcgcaccctcccctcccgtctactcattccccggggcgtttctttgccgatttttgaatgtgattttaaagagtgaaaaatgagactatgcgtttttataaaaaatggtgcctgattcggctgtctcagactctttttgtacctggtgaccccttttcagcttctgctgggctggggcctgatggggagggtctcggtggtaccaggtctcctccaccgccatggcttccaaggtggtctgctcgggcccaggccatcttccaggtggggtgaggcagtgggtcccacttcccctcctacccctcccagctgacagtcctctccacctagtggctgtccagtgcccattcctcaccttttcccggggaggagagagcagcttctgccacttcccaggtaagcaggaggaggtgccaacagtgttaggcctggcacagtgtctgggtgatcgggacct

SEQ ID NO: 57137 - DNA, 2613 bp, Homo Sapiens
attgattcgataggcgacgcggggagcggaagccctttacactacggtgtttccggcttcaagatggtcgcctaagctgtttagtgaaacttcttccacctttctccattcctctaggtgctttttctgaacctggatgtgaggcattaaaggatccgacggaaatagaattgaaggcattctaaaatggctaaccgtacagtgaaggatgcgcacagcatccatggcaccaaccctcaatatctggtggagaagatcattcgaacgcgaatctatgagtccaagtactggaaagaggagtgctttggacttacagctgaacttgtagtcgataaagccatggagttaaggtttgtgggtggcgtctatggtggcaacataaaaccaacaccctttctgtgtttaaccttgaagatgcttcaaattcaacccgagaaggatatcattgtagagtttatcaaaaatgaagatttcaagtatgtccgcatgctgggggcactttacatgaggctgacaggcactgcaattgattgctacaagtacttggaacctttgtacaatgactatcgaaaaatcaagagccagaaccgaaatggggagtttgaattgatgcatgttgatgagtttattgatgaactattgcacagtgagagagtctgtgatatcattctgccccgactacagaaacgctatgtattagaggaagctgagcaactggagcctcgagttagtgctctggaagaggacatggatgatgtggagtccagtgaagaggaagaagaggaggatgagaagttggaaagagtgccatcacctgatcaccgccggagaagctaccgagacttggacaagccccgtcgctctcccacactgcgctacaggaggagtaggagccggtctcccagaaggcggagtcgatctcccaaaaggagaagcccctcccctcgccgagaaaggcatcggagcaagagtccaagacgtcaccgcagcaggtcccgagatcggcggcacagatcccgttccaagtccccaggtcatcaccgtagtcacagacacaggagccactcaaagtctcccgaaaggtctaagaagagccacaagaagagccggagagggaatgagtaatggactcagtttggttttagtccacatggcctcctgtggatatgaggatatctgtatgtggaaggattaagatctcccccaggcagctataagaatattttagtttttttcttatcaagtttctcaacctttatttttaatgaaggaggtgctgagttttgtatctttttaatcataatcaacatcagtttttgacccaactaaccttgactgtattcaaacttatgagagtataaaggatctggaggttggggatatgactgacaaggaaaggctgtggccacctgatgaccctttccctttttattaaaccggacacacctgtttcccatttcgctgtagtttagtttttggtttgttgtggttggaactgctttgagaatcctgggatttgtgctgctgctgttattcaaagatcaaaggagtaaaacatagttgctcctaacttttttccagcagcagcaagtggtaataaacatgaaaactggtttgtagcagttttgaaagaatagaatgcattcaaatgtaaggctgcttctggatcattaaagccagtttcatcaaacagttcaacagagagcagcacttaataccctttatacagcccgttttttcatagtttcatttgttcttgcccacaagcttgaaatccaggttaaggtatccagcctttatcatataagcattgacattatccaggcctagtcagtagcagtagggtaacgggattgaaaaagatttgatggagaggaaagtatctaatattagtcatggttttgacctaaattgctagacagtcgtgccattcacaaagtcagaaaatacagcaggaagagacagcttttagaggggcagagaattagaggatggtggtagtaatgaaaatgatgcattcagtttaacaagtttaatttgagacagctatggtatagctaaaaacaaaagcccataaagttggagatagggaccagagtttaacatagcgatctaggccagaattgacaatgtttaagtaatggtggaatctgtcaataagacttcccagagtgttaatatatatcagaaatgcacacaacagaaccataggcaacaccaacacaggaagaaatagaagtcacctattgaaaactggaatggcccattcagaaagacaggagaattaggagagagtgagtgaaagaagccaagggtcaagaatgcagaagcaaaggaaggactaaaaagcctccacggacatcgataatcaagagattattaagatctttgctagaagagttcctttacctgtacttaactcccttaaaaagagaaaagtgatggaatgacttctgcaactgtagtcccagcaggaactgtgaagaccagctgccctgcaggatccagtttttcttgggaggttgtatctggtcataaggtaaacattctatatattctatgcctgctctagaattgaaagacttcagcagtattaaagcattttttaatctt

SEQ ID NO: 57138 - DNA, 3493 bp, Homo Sapiens
ctgagagggagacgctccaagaggctcctcagtgtgggcgagtaaaatgccctgcgtgtgagaagcaggctcagattattgctactctgtattcagatcttcatgtgtctcttctaagctgaataaagctgttttggaactgtcaggtacctcaaagctctgactgacagtactccacaagcttgcctgccatgggctgtcgggatgtccacgcagccacagtcctttccttcctgtgtggaatcgcctcagtagcaggcctctttgcagggactctgcttcccaactggagaaaattacgattgatcacattcaacagaaacgagaagaacctgactgtttacacaggcctgtgggtgaaatgtgcccggtatgacgggagcagtgactgcctgatgtacgacactacttggtactcatcagttgaccagctggacctgcgtgtcctccagtttgccctacccctcagcatgctgatcgccatgggtgccctgctgctctgcctgattggaatgtgcaacactgccttcaggtcctcggtgcccaacatcaaactggccaagtgtctggtcaatagtgcaggttgccacctggtggctgggctgctatttttcctggcaggtactgtgagcctctccccatctatctgggtcatcttttataacatccatctgaacaagaagtttgagccagtcttttcatttgactatgcagtgtatgtcactattgctagtgctgggggcctgtttatgacttcccttatactatttatttggtattgtacatgcaaatctttgccttctcctttctggcaaccattgtactcccatccacccagtatgcatacttactcacagccctattcagcacgctctcgcctctctgccattgaaattgacattccagtagtttcacacaccacttaatggggaaatagttaattgttaaagaaaacttcttgtagcctcacattccccttgtgcaaagagctcttttggacctacatacattttcctttgtttttgaccaatcaatgaagccaaatttatatgtcctattagaatgaagtgctgctagtttttatgagaagtatattatattaaatgtgaattttttaaattttgcttcttatactggaaggaattttagccttcatattgatatctaattaattatttaagtggaagaggcctgcatcacaattgaggtaatgtagagcaacatgttaaagaatgatggttagcagaagctgttgtatacaatcttcatgaaaatttcagtgtgtatttttctttttctataatacctttaactgcaaagaaaaggcagtttcaaatataagaaatttatttcaggtaagggtaatattttaatagtagtcagtaatctagcttaaggctgtaactcttctatcggggctaattgtatgaataggtgtcagtatgttgaagattactttcttttgtgactttcttctacctcatgccactgtttaaaagtaaaatgtattttaatgatgttagaataagactaccattctaaatatcacctacttatgaataacatgtaataatttttaacattaatgattccataaattgtattattgggattagaatgtgctttatgacaggttagtgtttcctctgaggcagaaaactcttttttggagatatcttccatcaagcagtactcgtgcccatatacaatctcttagtggctaggagaaataaataaaagggccataatggtttgttctctttcagacataatttagtaggggacaagaagtctgttcttcagtgagtacactagagatttactctggtgactgccttttgagttatgggtgaagtaaggtatggctttaccataaccttgattcattcacccttgattcatttctcgcccccgtcactgattatttccttgagcatatatctctgcctaacactttagtaggtgctatagaggatacatgaaaagtatgagatctggttccatccagtaagacattttaatagagaagatcaaaatgttacctggcagttggggaataatctgacttcgttggcagttggccttaacttcttaatcattgatccaggaatatttcaaccagagacacaactttctggcagacagacaaattgtacaacaccaacaatatcctggaccttgaaattctgtttacttcagtccattgtatcctttaaggcacctgtgctagcctagattttgtaataacactgatttatgagaatggacaaaagtggtagggaaattgttccctctccacttctgaaagtatgatgatgtattaaggatggaggagttattaaaaatgtctcttctgatgaggtaacaattagatgaaaccatgttaaagctgagatgaacacttagaaattcagggatattgggtctttagccttatgaatttgagctgcttatttaattggtgtaatttactacatattagtactatattcgtaaggattttttattaaccattacagattttacaaacagctagttatatggtaaacagattattatgcctttttgcaattctgaatatgattctagtatttgtgtagatgtatttggtactttttcccctaattccaacactagtttatatatatagcgaataaatctagttgtataaatttttaaatgccgtcagtagaaagcacacaaggttatgatttttttaattactggcttctgatttctttcacttctgatccttttcctttttctcagatgtagctgagtcttgatcattttaagacaacgatgggtagaattttgagattaatgttaattttccctttttgttaatttcagtcccctctcactatgcttttgtccagaaggatcaagaattctaccatcccttgggtctttgtgtataaacaatgttaaataaaggtagactcagtctttaagatattagacagtttttttagtccatgggattgtaaatataaacattaactttcctataagaatattttggctttgtaatctatagcctcaaattggtatttattatggattcactagacaaacagctgtttccttattgtcttttttctttagtgtttctgatttgctatcagtagctgtttttaaagccgtccaaggaaaataattatttacagtttttgaagtcacttttgagccctcatcaagctctcattgtgatgggagggatacctttttgttgttaaaagcctattattgttaaaggccttttatggaaaccaacttggaaaacaaccttaaatgtggatgtatcagatttggtttatccagccatgggagagaaaacaaacctaagtttactttacttgtacatatacactacaatggatagtatatttgctgtaaactacaatgtaaaacctcaataaaagtgcgctgtacttcttaatgtttattaaaagatgtatttttacaaaaaaaaaaaaaaaaaaaaaaaaaa

SEQ ID NO: 57139 - DNA, 3338 bp, Homo Sapiens
gacatcatgggctatttttaggggttgactggtagcagataagtgttgagctcgggctggataagggctcagagttgcactgagtgtggctgaagcagcgaggcgggagtggaggtgcgcggagtcaggcagacagacagacacagccagccagccaggtcggcagtatagtccgaactgcaaatcttattttcttttcaccttctctctaactgcccagagctagcgcctgtggctcccgggctggtgtttcgggagtgtccagagagcctggtctccagccgcccccgggaggagagccctgctgcccaggcgctgttgacagcggcggaaagcagcggtacccacgcgcccgccgggggaagtcggcgagcggctgcagcagcaaagaactttcccggctgggaggaccggagacaagtggcagagtcccggagcgaacttttgcaagcctttcctgcgtcttaggcttctccacggcggtaaagaccagaaggcggcggagagccacgcaagagaagaaggacgtgcgctcagcttcgctcgcaccggttgttgaacttgggcgagcgcgagccgcggctgccgggcgccccctccccctagcagcggaggaggggacaagtcgtcggagtccgggcggccaagacccgccgccggccggccactgcagggtccgcactgatccgctccgcggggagagccgctgctctgggaagtgagttcgcctgcggactccgaggaaccgctgcgcccgaagagcgctcagtgagtgaccgcgacttttcaaagccgggtagcgcgcgcgagtcgacaagtaagagtgcgggaggcatcttaattaaccctgcgctccctggagcgagctggtgaggagggcgcagcggggacgacagccagcgggtgcgtgcgctcttagagaaactttccctgtcaaaggctccggggggcgcgggtgtcccccgcttgccagagccctgttgcggccccgaaacttgtgcgcgcagcccaaactaacctcacgtgaagtgacggactgttctatgactgcaaagatggaaacgaccttctatgacgatgccctcaacgcctcgttcctcccgtccgagagcggaccttatggctacagtaaccccaagatcctgaaacagagcatgaccctgaacctggccgacccagtggggagcctgaagccgcacctccgcgccaagaactcggacctcctcacctcgcccgacgtggggctgctcaagctggcgtcgcccgagctggagcgcctgataatccagtccagcaacgggcacatcaccaccacgccgacccccacccagttcctgtgccccaagaacgtgacagatgagcaggagggcttcgccgagggcttcgtgcgcgccctggccgaactgcacagccagaacacgctgcccagcgtcacgtcggcggcgcagccggtcaacggggcaggcatggtggctcccgcggtagcctcggtggcagggggcagcggcagcggcggcttcagcgccagcctgcacagcgagccgccggtctacgcaaacctcagcaacttcaacccaggcgcgctgagcagcggcggcggggcgccctcctacggcgcggccggcctggcctttcccgcgcaaccccagcagcagcagcagccgccgcaccacctgccccagcagatgcccgtgcagcacccgcggctgcaggccctgaaggaggagcctcagacagtgcccgagatgcccggcgagacaccgcccctgtcccccatcgacatggagtcccaggagcggatcaaggcggagaggaagcgcatgaggaaccgcatcgctgcctccaagtgccgaaaaaggaagctggagagaatcgcccggctggaggaaaaagtgaaaaccttgaaagctcagaactcggagctggcgtccacggccaacatgctcagggaacaggtggcacagcttaaacagaaagtcatgaaccacgttaacagtgggtgccaactcatgctaacgcagcagttgcaaacattttgaagagagaccgtcgggggctgaggggcaacgaagaaaaaaaataacacagagagacagacttgagaacttgacaagttgcgacggagagaaaaaagaagtgtccgagaactaaagccaagggtatccaagttggactgggttgcgtcctgacggcgcccccagtgtgcacgagtgggaaggacttggcgcgccctcccttggcgtggagccagggagcggccgcctgcgggctgccccgctttgcggacgggctgtccccgcgcgaacggaacgttggacttttcgttaacattgaccaagaactgcatggacctaacattcgatctcattcagtattaaaggggggagggggagggggttacaaactgcaatagagactgtagattgcttctgtagtactccttaagaacacaaagcggggggagggttggggaggggcggcaggagggaggtttgtgagagcgaggctgagcctacagatgaactctttctggcctgccttcgttaactgtgtatgtacatatatatattttttaatttgatgaaagctgattactgtcaataaacagcttcatgcctttgtaagttatttcttgtttgtttgtttgggtatcctgcccagtgttgtttgtaaataagagatttggagcactctgagtttaccatttgtaataaagtatataatttttttatgttttgtttctgaaaattccagaaaggatatttaagaaaatacaataaactattggaaagtactcccctaacctcttttctgcatcatctgtagatactagctatctaggtggagttgaaagagttaagaatgtcgattaaaatcactctcagtgcttcttactattaagcagtaaaaactgttctctattagactttagaaataaatgtacctgatgtacctgatgctatggtcaggttatactcctcctcccccagctatctatatggaattgcttaccaaaggatagtgcgatgtttcaggaggctggaggaaggggggttgcagtggagagggacagcccactgagaagtcaaacatttcaaagtttggattgtatcaagtggcatgtgctgtgaccatttataatgttagtagaaattttacaataggtgcttattctcaaagcaggaattggtggcagattttacaaaagatgtatccttccaatttggaatcttctctttgacaattcctagataaaaagatggcctttgcttatgaatatttataacagcattcttgtcacaataaatgtattcaaataccaaaaaaaaaaaaaaaaa

SEQ ID NO: 57140 - DNA, 1599 bp, Homo Sapiens
gaacctggcttcgctaacgccctcccagctccctcgggcctgacttccggtttcctcgcgcgtccctggcgccgagcccgcggacagcggcagccccttttccggctgagagctcatccacacttccaatcactttccggagtgcttcccctccctccggcccgtgctggtcccgacggcgggcctgggtctcgcgcgcgtattgctgggtaacgggccttctctcgcgtcggcccggcccctcctgcctcggctcgtccctccttccagaacgtcccgggctcctgccgagtcagaagaaatgggactccctccgcgacgtgcccggagcagctcccttcgctgtggaagcggcggtgtcttcgaagaaaccggaagcccgtggtgacccctggcgacccggtttgttttcggtccgtttccaaacactaaggaatcgaaactcggcggccttgggggcggccctacgtagcctggcttctggttgtcatggatgcactggtagaagatgatatctgtattctgaatcatgaaaaagcccataagagagatacagtgactccagtttcaatatattcaggagatgaatctgttgcttcccattttgctcttgtcactgcatatgaagacatcaaaaaacgacttaaggattcagagaaagagaactctttgttaaagaagagaataagatttttggaagaaaagctaatagctcgatttgaagaagaaacaagttccgtgggacgagaacaagtaaataaggcctatcatgcatatcgagaggtttgcattgatagagataatttgaagagcaaactggacaaaatgaataaagacaactctgaatctttgaaagtattgaatgagcagctacaatctaaagaagtagaactcctccagctgaggacagaggtggaaactcagcaggtgatgaggaatttaaatccaccttcatcaaactgggaggtggaaaagttgagctgtgacctgaagatccatggtttggaacaagagctggaactgatgaggaaagaatgtagcgatctcaaaatagaactacagaaagccaaacaaacggatccatatcaggaagacaatctgaagagcagagatctccaaaaactaagcatttcaagtgataatatgcagcatgcatactgggaactgaagagagaaatgtctaatttacatctggtgactcaagtacaagctgaactactaagaaaactgaaaacctcaactgcaatcaagaaaggcaagtcactgtttaccggaaaccactgattccagccaaactgcctgaagagcaactagctgtcatatcttatcaaaatctcatcaaatgagagattgataagccaaagtatatatagtacattcgcagcctacccattctctgctttggcttcagtctcatactggtcaacttcacacataaaggtgttgctgatgtgttttttcttcagtactgtattcttttccccttgtggcttttctcagccaagtgttgcttatgtgtataagactgaggtgttaagtttgctctagttgaccttttaccacagctacttcatatatttgaaaaaaaaaaaaaaaaaa

SEQ ID NO: 57141 - DNA, 3676 bp, Homo Sapiens; identical to SEQ ID NO: 30534

SEQ ID NO: 57142 - DNA, 3689 bp, Homo Sapiens
gcgtgcgtgtgtacgactctgcgtgcgtgcgtgcgtgcgtgcgtgccgtcagctcgccgggcaccgcggcctcgccctcgccctccgcccctgcgcctgcaccgcgtagaccgacccccccccagcgcgcccacccggtagaggacccccgcccgtgccccgaccggtccccgcctttttgtaaaacttaaagcgggcgcagcattaacgcttcccgccccggtgacctctcaggggtctccccgccaaaggtgctccgccgctaaggaacatggcgaaggtggagcaggtcctgagcctcgagccgcagcacgagctcaaattccgaggtcccttcaccgatgttgtcaccaccaacctaaagcttggcaacccgacagaccgaaatgtgtgttttaaggtgaagactacagcaccacgtaggtactgtgtgaggcccaacagcggaatcatcgatgcaggggcctcaattaatgtatctgtgatgttacagcctttcgattatgatcccaatgagaaaagtaaacacaagtttatggttcagtctatgtttgctccaactgacacttcagatatggaagcagtatggaaggaggcaaaaccggaagaccttatggattcaaaacttagatgtgtgtttgaattgccagcagagaatgataaaccacatgatgtagaaataaataaaattatatccacaactgcatcaaagacagaaacaccaatagtgtctaagtctctgagttcttctttggatgacaccgaagttaagaaggttatggaagaatgtaagaggctgcaaggtgaagttcagaggctacgggaggagaacaagcagttcaaggaagaagatggactgcggatgaggaagacagtgcagagcaacagccccatttcagcattagccccaactgggaaggaagaaggccttagcacccggctcttggctctggtggttttgttctttatcgttggtgtaattattgggaagattgccttgtagaggtagcatgcacaggatggtaaattggattggtggatccaccatatcatgggatttaaatttatcataaccatgtgtaaaaagaaattaatgtatgatgacatctcacaggtcttgcctttaaattacccctccctgcacacacatacacagatacacacacacaaatataatgtaacgatcttttagaaagttaaaaatgtatagtaactgattgagggggaaaagaatgatctttattaatgacaagggaaaccatgagtaatgccacaatggcatattgtaaatgtcattttaaacattggtaggccttggtacatgatgctggattacctctcttaaaatgacacccttcctcgcctgttggtgctggcccttggggagctggagcccagcatgctggggagtgcggtcagctccacacagtagtccccacgtggcccactcccggcccaggctgctttccgtgtcttcagttctgtccaagccatcagctccttgggactgatgaacagagtcagaagcccaaaggaattgcactgtggcagcatcagacgtactcgtcataagtgagaggcgtgtgttgactgattgacccagcgctttggaaataaatggcagtgctttgttcacttaaagggaccaagctaaatttgtattggttcatgtagtgaagtcaaactgttattcagagatgtttaatgcatatttaacttatttaatgtatttcatctcatgttttcttattgtcacaagagtacagttaatgctgcgtgctgctgaactctgttgggtgaactggtattgctgctggagggctgtgggctcctctgtctctggagagtctggtcatgtggaggtggggtttattgggatgctggagaagagctgccaggaagtgttttttctgggtcagtaaataacaactgtcatagggagggaaattctcagtagtgacagtcaactctaggttaccttttttaatgaagagtagtcagtcttctagattgttcttataccacctctcaaccattactcacacttccagcgcccaggtccaagtctgagcctgacctccccttggggacctagcctggagtcaggacaaatggatcgggctgcagagggttagaagcgagggcaccagcagttgtgggtggggagcaagggaagagagaaactcttcagcgaatccttctagtactagttgagagtttgactgtgaattaattttatgccataaaagaccaacccagttctgtttgactatgtagcatcttgaaaagaaaaattataataaagccccaaaattaagaattcttttgtcattttgtcacatttgctctatggggggaattattattttatcatttttattattttgccattggaaggttaactttaaaatgagccctatcactgagaaatacgtgtttcatgatttaactctgtgtgtgtgtgtgtgtgtgtgtgtgtgtgtgtgtgtattttttttttggttgtcttcagctgacagtatgaaaaatgaaactgctgaaaaagctgagcacctggtcacccttggccttccattgctttggccttcagtaaaaagcagcctcccttctaggtcagggaaccatgccattgagactagtaacgggcgttctgggcacagtcccactgtgcacaggtttgagaggacaagttcatcagaaggaaggcagtccttagaagtcacatacgttgagccacgttgctcctaagcctggctctgtcaagctgggtcaggggccttgaaactggagaagtggaagtctatggttggtctgagtaagtaacttcctgtcttcatgaaaaaagttgactttgaatcccaggtactcacagaaatggtgaacagacttagttgttacccaggcacccatggattgtgttgagtgtgcagacagggaggccaccccaataggaattcgtctccaggatttttcccatgtgtcccccagtacttataaaagggagtgaaaagaccgagctgtaaggcatgtgccttctgccacctgactttccgtgaggggactaaaatttactaattgtagttgctgcagccagttaagtcctgtagcttccaggccctcatgtctttgataggagagtgcttaggtggtccccaacagtgcctaggggtacagtacagtcccattacactagagcagggctctatttatttttaaaggatatggccgtgtgttttgataaaactttattcacaaaaacagccgggtcatgggatttggcttgtgagtctgtaacagttcttaaaaagaatatctgagaaactactctgttttagacctttgaaggtgatttagagttttgtgtacatctaggagaaggtgttcagcttctcagaggatgtggacattttggttgcagctaaaaatcagtctctgaagtctctctcccttctagaggttaggacttggtgaacatgtttgtgggccttttgactgagtggcagaaggaaactgctcaggaagagaaacaggtgactgatgggaaggttgattattttctcagtcatcctggcagccaaaaatgtgccaggaaaagaaagaatgtggagcacgcgtggctcctggaggacttggagatgcatgcacatttagggtgttttccctagaattacataaaaaaaaaaaaaaaa

SEQ ID NO: 57143 - DNA, 1369 bp, Homo Sapiens; identical to SEQ ID NO: 30862

SEQ ID NO: 57144 - DNA, 3685 bp, Homo Sapiens
gcggggcggcgggcgtgtccgaagtcgcgcgcggctggcgcgcggtcccgagtgaaaggagaaggaggggcgctgggggtgacggtgcggagccgctgccagcgctgggcgagagtcggcggccggatccgaggagcaggcgggcctgaggccgagtcagctgcgcgggcccccggatcccccgacagagcggcggcggtgtctggccaggcggtaggcgctgcctggccgcggcggggaagatgttcagcgtagagtcgctggagcgggcggagctgtgcgagagcctcctcacttggatccagacatttaatgtggatgcaccatgccagaccgtggaagatttaacgaatggggttgtgatggcccaggttcttcaaaagatagatcctgcatattttgatgaaaattggctaaacagaatcaaaactgaagtaggagataattggaggctaaagataagcaatttaaagaaaattttaaaaggaatcttggattataatcatgagattttaggacagcaaattaatgactttacccttcctgatgtgaaccttattggggagcattctgatgcagcagagcttggaaggatgcttcagctcatcttaggctgtgctgtgaactgtgaacagaagcaagagtacatccaagccattatgatgatggaggaatctgttcaacatgttgtcatgacagccattcaagagctgatgagtaaagaatctcctgtctctgctggaaatgatgcctatgttgaccttgatcgtcagctgaagaaaactacagaggaactaaatgaagctttgtcagcaaaggaagaaattgctcaaagatgccatgaactggatatgcaggttgcagcattgcaggaagagaaaagtagtttgttggcagagaatcaggtattaatggaaagactcaatcaatctgattctatagaagaccctaacagtccagcaggaagaaggcatttgcagctccagactcaattagaacagctccaagaagaaacattcagactagaagcagccaaagatgattatcgaatacgttgtgaagagttagaaaaggagatctctgaacttcggcaacagaatgatgaactgaccactttggcagatgaagctcagtctctgaaagatgagatcgacgtgctgagacattcttctgataaagtatctaaactagaaggtcaagtagaatcttataaaaagaagctagaagaccttggtgatttaaggcggcaggttaaactcttagaagagaagaataccatgtatatgcagaatactgtcagtctagaggaagagttaagaaaggccaacgcagcgcgaagtcaacttgaaacctacaagagacaggtagtagaactacaaaacagattatccgaagaatcaaagaaagcagataaactagattttgaatataagcggctaaaagaaaaagttgacagtcttcaaaaagaaaaggacaggctgagaacagaaagggattctctgaaggaaaccattgaagagcttcgttgtgtacaagctcaagaagggcagctcacaacacaagggttaatgcctcttggaagtcaggagtcttcagacagtctagctgcagagattgttacacctgaaatcagggagaaacttattcgtcttcagcatgagaataagatgttaaagcttaaccaagaaggttcggacaatgaaaaaatagccttattgcagagccttctagatgatgcaaatctacgcaagaatgaactggagacagagaataggctggtgaatcaaagacttctggaagtacagtcacaagttgaagaattacaaaaatctttacaggatcaaggctcaaaagcagaagattcagtccttctaaaaaagaagcttgaagaacatctagagaagctgcatgaggccaataatgaactacagaagaagagagccattattgaagatctcgagccaagatttaacaacagctccttaaaaattgaagaattacaagaagctttacgaaagaaagaggaagaaatgaagcaaatggaagaacgatacaaaaaatacttagagaaagccaaaagtgtcatccgtactttagatcctaaacagaatcaaggagcagcaccagaaatacaagctcttaaaaatcagctccaggaacgagaccgactgttccactcattagagaaagaatatgagaaaacaaagagtcagagagagatggaagagaaatatattgttagtgcctggtacaatatgggaatgaccctgcataaaaaggcagctgaagatagactggcaagcacaggctcagggcagtcatttctggcgaggcagaggcaagcgaccagcagcagaagatcatacccaggccacgtgcagccggccacagcaaggtagagaagttgtgccgctcaatcacagacacctgcacccacaacatacttctgttacacacaagaacatttcaggaaactcagccagcttattttttgtttctcttctatgtcaatacttagtgtttctcattttgaggactttttctctctcctgtatctttgttttagtttctttggtttttattttgtagtcctttcagttatttttaatgtgccaaaaatttgtacatgttcaattaaaaatgttgtataatagtgtaatacttttctttgtatgaaaatgtcctcttcttcaaaggtataggctttgtaatgaattagattttctgccaataattgatatacaatttatattctttattgtgcctgtgtgttaccatgctaagaatgtctttgtttaaagggaattaatctttttatgatgtattaatctgtgttttcaattgttttccaagtacagttcaaataacttgcatatttactatacaaaatggttgacaagtgttctttttgcaaagacttgaatacattggcagaggtgctaatcacatcttccctaaggcacctggaagaattatttgaggaaaaaatgagttttcacattgttttataggaaattaaatttgtccaaagatttggagactatttttaaaacataaatacataaaatttcattatttcctgctatcttgtttgctggcagaagtgaatgtttggtgaggttattttgggataaattacaaaagaaaaaaaattagacactgcattaatttcttgttcttttggaatatcttagtaactgaggatcattttctaacaatgtggttgacataccttcagttgctttccacatctaaaagagttatctttcatatatgtacaagttattggtagtcttatttttgggctgtttgttgacttatgccccatttgttttacttgttctttaatataaacccttccattttttaacaattcctaacacttgatatcttaatatcagtcactaacattagtaacttcttgtatgttatattatggcagatctctttacgttttttctcacatctatctgctagtccaggaatttgttactaaatagattttcttggatatttggttgcctcaaagtgcttacatttgttaacagattgtaaaccacatttatttacattgatgaatgggctgttgaataatcattgtaaagcactttgtatatataaggtgctatataagtgtgaaatatcattcatttataaatgaaatgccttctaactttccatattg

SEQ ID NO: 57145 - DNA, 5723 bp, Homo Sapiens; identical to SEQ ID NO: 29225

SEQ ID NO: 57146 - DNA, 1317 bp, Homo Sapiens
agctcccgcgcgctagagccgcctgctggtctcacccagccgggaccgctgacctggcgctttgtgcggctccaggcctccgagtggactccagaaagcctgaaaagctatcatggcagcaaggcccaagctccactatcccaacggaagaggccggatggagtccgtgagatgggttttagctgccgccggagtcgagtttgatgaagaatttctggaaacaaaagaacagttgtacaagttgcaggatggtaaccacctgctgttccaacaagtgcccatggttgaaattgacgggatgaagttggtacagacccgaagcattctccactacatagcagacaagcacaatctctttggcaagaacctcaaggagagaaccctgattgacatgtacgtggaggggacactggatctgctggaactgcttatcatgcatcctttcttaaaaccagatgatcagcaaaaggaagtggttaacatggcccagaaggctataattagatactttcctgtgtttgaaaagattttaaggggtcacggacaaagctttcttgttggtaatcagctgagccttgcagatgtgattttactccaaaccattttagctctagaagagaaaattcctaatatcctgtctgcatttcctttcctccaggaatacacagtgaaactaagtaatatccctacaattaagagattccttgaacctggcagcaagaagaagcctccccctgatgaaatttatgtgagaaccgtctacaacatctttaggccataaaacaacacatccatgtgtgagtgacagtgtgttcctagagatggtattgtctacagtcatgtcttaatggatcccagctctgtcatggtgctatctatgtattaagttgggtcctaagttgggtcttttgtgtcaacgagatcatctcttctagaaatatcaaccttttttgtccagtaaataattgttaggggatctttattggaaaacttttttggagaggctggtatttaagttagatctgattgggctactcatgtcctgtagccagttcatcctcataataagaatgggcaggatctcttgttctctcctgagtgtctttctactctcctgagcgtctttctgctctccttatcctgttctcttatccttatcccctccagtctctgcctaatttttagtgtttaataacaaccgaatgtctagtaaatgactctcctctgagctgtaataaataaaatggtagtaatgaatgcaatcagtattagccaaaataaagaatttatgagtcattaaaaaaaaaaaaaaaaaaa

SEQ ID NO: 57147 - DNA, 6930 bp, Homo Sapiens; identical to SEQ ID NO: 30817

SEQ ID NO: 57148 - DNA, 4565 bp, Homo Sapiens
tgcactctgggggaacatggccgcttccggtctccctcccgggccggcgctggcctgactgcggccccggtccgtagcactccgccctccgcttctcccgccctgtagccgcgaagactgcttcagcctttccctgtgctgcccctgccgcgcgatggagaagagctcgagctgcgagagtcttggctcccagccggcggcggctcggccgcccagcgtggactccttgtccagttaatgtgttaagagccattgacatttgaagatcatcagaagtgaagataaaacatctcaaaaattataattgcctccacttctcattcagagaattcagtgcatacaaaatcagcttctgttgtatcatcagattccatttcaacttctgccgacaacttttctcctgatttgagggtcctgagggagtctaacaagttagcagaaatggaagaaccacccttgcttccaggagaaaatattaaagacatggccaaagatgtaacttatatatgtccattcactggcgctgtacgaggaactctgactgtcacgaattataggttatatttcaaaagcatggaacgggatcccccatttgttttagatgcttcccttggtgtgataaatagagtagaaaaaattggtggtgcttctagtcgaggtgaaaattcttatggactagaaactgtgtgtaaggatattaggaatttacgatttgctcataaacctgaggggcggacaagaagatccatatttgagaatctaatgaaatatgcatttcctgtctctaataacctgcctctttttgcttttgaatacaaagaagtattccctgaaaatgggtggaagctatatgaccctcttttagagtatagaaggcagggaattccaaatgaaagctggagaataacaaagataaatgaacgatatgaactttgtgatacataccctgccctcctggttgtgccagcaaatattcctgatgaagaattaaagagagtggcatccttcagatcaagaggccgtatcccagttttatcatggattcatcctgaaagtcaagccacaatcactcggtgtagccagcccatggttggagtgagtggaaagcgaagcaaagaagatgaaaaataccttcaagctatcatggattccaatgcccagtctcacaaaatctttatatttgatgcccggccaagtgttaatgctgttgccaacaaggcaaagggtggaggttatgaaagtgaagatgcctatcaaaatgctgaactagttttcctggatatccacaatattcatgttatgagagaatcattacgaaaacttaaggagattgtgtaccccaacattgaggaaacccactggttgtctaacttggaatctactcattggctagaacatattaagcttattcttgcaggggctcttaggattgctgacaaggtagagtcagggaagacgtctgtggtagtgcattgcagtgatggttgggatcgcacagctcagctcacttcccttgccatgctcatgttggatggatactatcgaaccatccgaggatttgaagtccttgtggagaaagaatggctaagttttggacatcgatttcaactaagagttggccatggagataagaaccatgcagatgcagacagatcgcctgtttttcttcaatttattgactgtgtctggcagatgacaagacagtttcctaccgcatttgaattcaatgagtattttctcattaccattttggaccacctatacagctgcttattcggaacattcctctgtaatagtgaacaacagagaggaaaagagaatcttcctaaaaggactgtgtcactgtggtcttacataaacagccagctggaagacttcactaatcctctctatgggagctattccaatcatgtcctttatccagtagccagcatgcgccacctagagctctgggtgggatattacataaggtggaatccacggatgaaaccacaggaacctattcacaacagatacaaagaacttcttgctaaacgagcagagcttcagaaaaaagtagaggaactacagagagagatttctaaccgatcaacctcatcctcagagagagccagctctcctgcacagtgtgtcactcctgtccaaactgttgtataaaggactgtaagatcaggggcatcattgctatacactcttgattacactggcagctctatgagtagaaagtcttcggaatttagaacccatctatgagagaaagttcagtcactttatttattttaaatctctctaggatgagtttagaactgtagcagtgcaggtggcttaagtgaagtaactccatatgtaattacatgattatgatactaatcttttaagtatccaaagaatattaaaatacttcaatcctggattcacagtgggaacaagtttctattaaaaggcaaatgctgttacaaatttttggcatctggtaatattaaaaccattttagaaatacactctgtgctcactgtgcagaggaacatcagttttcaaaccaacactgaaattctgtggcatcacatatattgggccttgatgtcatgacagatcaaaatcatttgatatccctttctccattctaggtttttctttttttcagtaactgatttaccttgatcacttttcaacttccatattcttcatatagtaaaaggcaaagtgttgaagatactacggtgtggtagtagttgaaaattattgccgtcattatttacatacttaagacatattagcaagttgatccaaaatgggaggccttatagatgtgcttgggggaaaatgaaggggagaaagtagccatacaggagttcaaagaattccatgcccttcagattagcccaattaccagaaacatcatgaaagatattttaaaaactaattatttactacagtgtatttcacttgtcttgtgtgtctgaacacacagaagctaattagcaagtttttaagaagtatttaaaaatcttactaggattgacattttttctgaattctgtataaatagcttatagtgagaagtactgtgctcaaattttacatttttttcctttgcaaattctgtaatttcactcaacgattaagtctaccaaagaacacactgcatgtaaaagatgtattacaatctcaaagccagtaaaagaaatcttgcttcactgttcacctgctacaagtaagagtttggtgctggtagaaacatttgactctgatgtctattttattctacataagagccatatgtaatgtactgtaacaaaggagcttcttgtccccttggtcttttaattaaaagaaattccaactgacttttaaactttgttcttgtccaaagttgccatttcttttttttccccagaaatatttggaaattattggaggaatatgcaccccagatgaaaatgttcagtttgtacccatttttccttaaccaacacccaaatcaaacaattaaaatatacagtgtttttccactcactaattcactatacagagagtctgaaccttagcctccctcttggtcttgcagtgaggaagtttctattagtatatccaatttagcaaaattggtaccaaaatgatttctttggtaattgtgtgaaatataagctttttaacagggcatttaagtggctagcaaatcagtaattaaaaattaagctttctactccaagtatttcacaaacgcatctgccattttcctcatttaaaccttggttatcttggcctgataccacataaaagaatgtagaatggctgaagagatcaagaatttaaagcttctagtcttaacatacttgcatccacttcaaattcaaatcaaaagccagggaaatctaagtgcaaccctaccacttctctgctgagaaccttccagtggttcccctcaccttctgcagaagtctccaatatggagtacatgcacttgggcatttaatatataccactggtgtgtgtgggagggagggaggaggaatactagccctttttatatatttacacaagcaaaacttttaaatatttgaattgacagttacatgtttcataactttgtatgtctattggttgtgcaggtgtaattttttccctttttgattagggttacaaaatttagagaccagtatgattaagttgaagctccttagcctccttcgacctagtctctgcatacctcaacttttacgtaccaatgctactctgctgttcacaattgcctcatgtaatctgcagattcctgcctccccactttggttcagtctgtcttgtgcacctggaacaactgttctcccttgtgactaattcctattttctagagtttaggcatcatctcttcctttgggaagttatctgattcacgactgccttctctgacatccccaccttcctctgtgcccccatagcactgtgtataccgctactaccactgcaattcacattatattggaatgaacaattcacatgtctaccacaagtctgtaaacataaccttatttgaaatgaattgcaataaagctctgttacaacgt

SEQ ID NO: 57149 - DNA, 7932 bp, Homo Sapiens
gaagcttgaagacattatgctaagtgaaataagccagtcacaaaagaacaaatattgtattatttcagttatataaagtttctagactagtcaaattcatagaaactaggatgatagttgctagggtcagggagaagaggggatggaaaggtattgtttaatggatgcagagtttcagtttgagaagatgaataaaagaaaaaaatgacattaaattttgtcaagatagcatattgaaaatataatagaaaaatatttgtttatctgctataatatattatgtcataggtgttatcttcaggaaggcacactggacctgctaaattaacaaatggaaagaaagcgtaagtacttgaagacgtttacaacttcagatttcaaggaatttttcaggtctttgggctggatgacatgtcgtctaccccagaaaattaggtaggcctctaccatcacaagctctgaggaacaatttttcatgtctacccatgttaatcattttagtatttaacagtctttctgatcttcagaatgtgtttataaattcatcttgtacatggttggacaagctttcttgtctttgctggaaagaaaatgactacttactaatatattttgggaaaaatatttgtaagaatattaataagcttgttttccaggacctatttaagaaaaataccacgttttaatgcagattctggctattccatccattctgattcagaaagtcaggtaagattgaatagatacaatacacactattttaattagttttcaaatagtagctaaaaagtaggaataaaatgcaaagtattaattgctctaaggaagtatgaagtctgttgctttaaaacatcttttctaccaataatagtttgtaaataaacaaattttaaaactacataatttatattttttcctacactaacagtcatatacaaatgtattctaaatgactttatttcttacaggctgaaactgtacacgggcttgatggttgtgcttctttgctgagggacattttgagaaatgaagattcaggtttttttttttttaattctttgctgatcaccttatctcaagtcattattttgatgtaacaaatttttgttttattaataggttcagaaacagcatatttagaaaacagatctaattctagacctttagaaagcaaaagatacggatcaaaaaagaaaagacatgaaaaacatactattcctttggtagtccagaaagaaacatgtaagccttttttctcttagttatttaaagatgatccttaattgtgggtattttgatcaattatcaggattatacagttgattttcattttaataatcagtattagttaggtttatgtgtgcttatgcctttctgtattcagcttctaatcactgagtagtccactttgcttgctatcattttctcaagaagaaaaatagaaaaagagactgtcagggttttgtaggagaaaaagttcaaactcagaatgacatttgggaggtatatagagtgatcttagtttcccctgccacttgttttcatagataatcataaattggttgtatttcaagtgtatacttctagtagttgccttaaaattattatatttatatatatatatatcctaagttggtcaagctgaacttgtcaagctacacagttaggatacatggtacataggaaggtaaaatcggatgaataaggaaaggctgctgctgattggtggtgagtatagccaagggtactttacaccctcacggctaacttttcctagtttagaacaagaaagttttgattatgttgtcccttggaggcctagaaaacaagatagcccaaaatgaagatgaaaaagtccacagtgggaattcagatggactagaattagactagccagttctatagttcaggtgggccagaaatgtcagcactgtagtacgtgcttagattcagcttgggcaaggaatgaagtttagaaagtcatataaagcagtagccctataaagagatcaggatttaagcaaggaggctgagaaagtgtcagtagagcattcatgggactagaggttgatgtttcagatagtcccaaggtagagaactaaggcaagggaaacctaactcatcttggaggccagtaatgatagctttatattatcttgacctgtgctattcaagatggtagccactggccacatgtggctattcagcacttgaaatgtgactagtacaaccaaggaattgaattttaatgttatttaatttaaattaatttaaaattaaattagaaaactgataattgatccagttattataaaacttttaagtatgtttggaataacttgggcatgtgaacctaccttttcaagtgtaaattttattaaatctaaatatagaccaagtatttctgatgagaatttagcatctagattgtgctttgtgtaaaatatatgctagatttagaagatttaatacaaaatttcagttatttatattatacactgaaatgttaatattttggatatattgatttaaatattatgaaaagtaattttacctattttatatggttactggaaatttcaagttacatatatggtttgtattatatttctattggacagcattggtctaagctcaatacactacagccagttttataagtaatgtttagttattttattgtgtaaataagattttattagaatgcagccaagctaatttattaatgtgtttttattagctgtttttgtgctgcagtgtcagagttgagtagttttgacagagatcatctggcctgctaaacctaaaatatttatttgacctttgaagaaagagtgctaaaccctggccttaactctttaaagcagaggcctttttattggggcccaactgagaaggaaaggagcggtagcacctgttcctccagtctcctactttttgtctgtaggcaggttatttcttatccagggcaccttttcctcaaggaactattatttgcaatatatgtgactggcagtgggtgtcatggtatcaacttactggatcctgacttaactgcttctgtcggtcagagttccaacaagaaacagatggcaacactcaaattgaggtaattttaggagggtttatttacaaagggactcatgaaggtatgaatagggtataggaaaaccacaggttttgcctactaggtcatgcgagcctagtgctagcagcagagcagcagagctgttatcatctctaggccataagggattaggagagagagaggttactggatctagaaagagatactgtttatagaatacgctaccttgagaagagcagtgagcttcattgaaatgacgaaggcagcccaaggtggccttatagaaagggagcaggaataagtgtatatcctgacttcatgcttcttcctttccttgatatgccaagactcccattggattgaacccaactgaagccctactgatgtatatcaggtctgggatttgactcttacaagctagtaagttagtcttactgtgtcatggatgctagcagaagacaagactactgggtcagagacaaaggactttattactcacagcacaggaagcagtatgtgcatcagcatattgtgttggttctcattcaccctagttcccattggggtgatatggtggacccatatggatgctgcacatgccttaggtttaggttgcagctgaggaacactgagcttggggaatccgtcactttggtagtaagcagtaatcaagcctgtgcttgtcccagagggaaacattacctcatccttcaaggttgctcactgcagacacaaccctgagaagcggcccaggtaaggagtttaggtcaaagccttgcttttttggtatatacagcaagacatattgaaggactgtctttttgcagcccatatggatcagcattccagggagaccagggtgaagaccagtagaggtgggtttggattggcagatggaagattctggcattctgggtccatagcgttaaattcttatttggattacagccgaatcagcagttctggcctgtgatcagggtgcaatattcttattgttctttctcccatattttcttaatcagaaggaaggacctacttccacaggacaatcttctttagggttgcaatattagaaattagtttctagttgtgtgtgtgtgtggttggcagctgttaaccaataatacaagattttgctttgttaccacaatgctcaaaaatacacaaaatccaagctcataacttgttctctttaccgtctccaagtgaagtaatcataaagaactttaagcgatctattacagcatgttaactagtatccatgtattattttacttttaacacacattatcttgctattttgtgttaactgtcttctggggagtggcctccttatgtactttctatctgggatgatatgatcattgaatgcctacctgatcactgaatgcctatggagtcagcatcttcagataataagaaacagatacctaatgaagcttctgctagaagtgaaagagacacatcagacctagagcaaaactggtcattgcaagatcattatagaatgtattcacccataatataccaagccctctgtgagcacgtgcagactcagatgtcactgatgaatgacttgacttcaaagaacatccctaatggaattcctgctgtaccatgccatgctccctctcattctgaatctcaggcaactcctcattctagttatggcttatgtacctccaccccagtctggtcacttcagcggccaccctgccctccaaaggttcattctgaagttcaaactgatggcaacagtcagtttgcatcacaaggtaaaacagtttctgcaacctgtactgatgttctacggaattcatttaataccagtcctggagttccatgtagcctgcccaaaactgacatatcagctattccaacattgcagcaactgggccttgttaatggaattctgccacaacaaggaattcataaggaaacagacctactaaaatgtattcaaacatatttgtctctttttcgatctcatggaaaagaaccgcatctggacagtcagacacaccgaagccctactcagtcacaaccagctttcttggccactaatgaagaaaaatgtgccagagagcaaattagagaggccacaagtgaaagaagggatttaaacatacatgtgcgagatacaaaaacagtgaaggatgtacagaaggcaaaaaatgtgaacaagacagctgaaaaagttagaattataaaatatttgttgggagagctcaaggccctggtagcagaacaagaggattcagaaattcagaggttgattacagaaatggaggcatgtatatctgtacttccaacagtaagtggaaacacagatattcaagttgagatagcactggccatgcaaccattaagaagtgagaatgctcagttacgaaggcagttgagaattttgaaccagcaactcagagaacaacagaaaactcaaaaaccatctggtgctgtggattgcaaccttgaattgttttctcttcagtcattgaatatgtcactgcaaaatcaattggaggagtcactaaagagccaggaattactgcagagtaaaaatgaagagctgttaaaagtgattgaaaaccagaaagatgaaaacaaaaaatttagtagtatatttaaagacaaagatcaaactatacttgaaaataaacagcaatatgatattgagataacaagaataaaaattgaattggaggaagccctagtcaatgtgaaaagctcccagtttaagttagaaactgctgaaaaggaaaaccagatattggggataacattacgtcagcgtgatgctgaggtgactcgactaagagaattaaccagaactttacagactagcatggcaaagcttctctccgatcttagtgtggacagtgctcgctgcaagcctgggaataaccttaccaaatcactcttgaacattcatgataaacaacttcaacatgacccagctcctgctcacacttccataatgagctatctaaataagttagaaacaaattacagttttacacattcagagccactttctacaattaaaaatgaggaaaccatagagccagacaaaacctatgaaaatgttctgtcctccagaggccctcaaaatagtaacactaggggcatggaggaagcatctgcacctggaattatttctgccctttcaaaacaggattctgatgaagggagtgaaactatggctttaatagaagatgagcataatttggataatacaatttacattccttttgctagaagcactcctgaaaagaaatcaccactttctaagagactatcccctcagccacaaataagagcagctacaacacagctagtcagcaacagtggacttgctgtctctggaaaagaaaataaactgtgtacacctgtaatctgttcctcttcaacaaaggaagcagaagatgcacctgaaaaactttccagagcatctgatatgaaggacacacagctcctcaagaaaataaaggaagcaattggtaagatccctgctgccaccaaggagccagaggaacaaactgcatgtcatggcccatcaggttgtcttagcaacagccttcaagtgaaaggcaatactgtctgtgatggtagtgttttcacttctgacttgatgtctgactggagcatctcttcgttttcaacgttcacttctcgtgatgaacaagacttcagaaatggccttgcggcattagatgccaacatagctagactccagaagtctttaaggactggtcttctggagaaatgaattcagaagaaaattcatcaggtgcttctttttaaaactagaacttggctatattgaatgtgtatttttctttagtgaaatgatgttttatgttattatgtgtgaagtaatatattgtacaagtaataaatgtattgttgagatatattgacactgaggagcttataaaaacaagtcatcttaagttcacaattgctacaagaagaaagttgtggataactaggaaattattgtaagtaatgttttatttcagtacttagcaattagagttcttttattaagatgtatctgctggattaagggtacaggttgaaatagttctgtggctgtcctaagaaataatgggaaaagaatctctggatgtaagtttttctgttgaaactagagggttttttttctgtttacatatacttttttttaatagcaatgtgtttttattaaacatgctgtgtgccacaggccagtgttgttggtgaaatatataaacatttatttaaagagaaaagttaccagtatctacacctcttaaaaaacattgattggtctaaaaaatatatagataacatcctaagttaacatatggcttcttaaaacttgggcacttttatttgtttttatcccaaattcatgttttaaggcctttaaagaatagtcagactgataaagaagtgctaacagataagctatagttggggaaatttgtgggttttttttaaataagaaatgtttatttttgtccttatatttaaacatgatggaatttgtaaatcttggcattgattgtaattctgcctttttggaagaattttttctcccagcatgttagctgagaatattctctattttataaataatatgaagtaggttggtctctctgcttctctataccaggacttcttagctcagtatcatctcccttcatgtaagcagcacgttttaactcttaggaagctgaatgttgtgttatcactaatactttgtacaggtcacctgcctactctaattgtccttagtacttggacaggctttatcattaaagagtgttctcctaatcccaaaaaaaaaaaaaaaaaaa

SEQ ID NO: 57150 - DNA, 2648 bp, Homo Sapiens
caccgcgggaaaccaaaatggcgaggggctgtattgaagtgggctgtgtttgaggccggtgtaagaacgctcattctacccccaacccttgtctccaaggacctcggtttgtgcgtgcatatgtgccgggtacccggtggggcgggtgcccagtaagtgctcggactcgcaggggaagcgcccacggggacggattggttgttttttcctgtatgaagcggttggcaccactgaagtgaccgaatgagagactctacaggggcaggtaattcactggtccacaagcggtctcctttacgtcgaaaccaaaagaccccaacatccttgaccaagctgtctttacaggatggacataaagccaaaaagccagcatgtaaatttgaagagggtcaggatgtcctagctagatggtcagatggcttgttttatcttggcactatcaaaaagataaacatattgaaacagagctgcttcatcatatttgaagacagttctaaatcctgggttctctggaaggacattcaaacaggagccactggaagtggggaaatggtctgtacaatatgtcaagaagagtattcagaagctcccaatgaaatggttatatgtgacaagtgtggccaaggatatcatcagttgtgtcacacacctcatattgattccagtgtgattgattcagatgaaaaatggctctgtcggcagtgtgtttttgcaacaacaacaaagaggggtggtgcacttaagaaaggaccaaatgccaaagcattgcaagtcatgaagcagacattaccctatagtgtggcagaccttgaatgggatgcaggtcataaaaccaatgtccagcagtgttactgctattgtggaggccctggagactggtatttgaagatgctacagtgctgcaaatgtaagcagtggtttcatgaggcttgtgtgcaatgccttcaaaagccaatgctatttggagacagattttatacgtttatatgctctgtctgcagttctggaccagaatacctcaaacgtctaccattacagtgggtagatatagcacacctatgcctttacaacctaagtgttattcataagaagaaatactttgattctgaacttgagcttatgacatacattaatgaaaactgggatagattgcaccctggagagctggcagacacaccgaaatctgaaagatatgagcatgttctggaggcattaaatgattacaagaccatgtttatgtctgggaaagaaataaagaagaagaagcatttgtttgggttgcgaattcgtgttcctcctgtgccaccaaatgtggctttcaaagcagagaaagaacctgaaggaacatctcatgaatttaaaattaaaggcagaaaggcatccaaacctatatctgattcaagggaagtaagcaatggcatagaaaaaaaaggaaagaaaaaatctgtaggtcgtccacctggcccatatacaagaaaaatgattcaaaaaactgctgagccacttttggataaggaatcaatttcagagaatcctactttggatttaccttgttctatagggagaactgagggaactgcacattcatccaatacctcagatgtggatttcacgggtgcttccagtgcaaaagaaactacctcgtctagcatttccaggcattatggattatctgactccagaaaaagaacgcgtacaggaagatcttggcctgctgcaataccacatttgaggagaagaagaggtcgtcttccaagaagagcactccagactcagaactcagaaattgtaaaagatgatgaaggcaaagaagattatcagtttgatgaactcaacacagagattctgaataacttagcagatcaggagttacaactcaatcatctaaagaactccattaccagttattttggtgctgcaggtagaatagcatgtggcgaaaaataccgagttttggcacgtcgggtgacacttgatggaaaggtgcagtatcttgtggaatgggaaggagcaactgcatcctgactgtaggactgaacattatgttcactgcactctgattttctgtaggtacagttcaaagccctaaagggagtctggcttttactatctttcttaaaaaaaaaaaaaaagagtcaaaaaaattcaaaaaaggggatgatactagccttaacatgtacctgtcaatgttatggatattgtcataaaaaggtatcttttaaaaatcagaacagagacttaattttttaaatcttaagatttgtagaatgtttctaggataggatattaaaaatgattgaaacccatgcatggtgttagacaatttttctaattattccattgagtcagttttttgtgattagtgattatcagagcaaacatcatgtagatagcacaagtatttggagaaacgttgtttgttttgattagtgattatcagagcaaacatcatgtagatagcacaagtatttggagaaacgttgtttgttttgttaccaaaatgttggaaaaatttatttcaataccttttagatttcataaagtgcagtgtatataatgcctactgaaagactgtaaaatattgaaattttctttcaagcaaagtgtaaaaaaatatattgagcctgtaaattgcaaaaaaaaaaaaa

SEQ ID NO: 57151 - DNA, 6822 bp, Homo Sapiens
aggctcggcagtcactgaacttgggagctgaagaatactggacggggcttcggagaggaaggatggtccaggcgcaccccaggggttgcgatgggctcttcttggtgtctgtatggttgctgcaatgctggggtgaaaacaacacggctagaagctcattctgaaatggggagcactgaaattttggaaaaggagaccccagaaaatctcagtaatggtaccagcagcaatgtggaagcagccaaaaggttggccaaacgcctttatcagctggacagattcaaaagatcagatgttgcaaaacaccttggcaagaacaacgaatttagcaaactagttgcagaagaatatctgaagttttttgattttacaggaatgacgctggatcagtcactcaggtatttctttaaagcattctctcttgtgggagaaactcaagaacgagagagagttttaatacacttctccaatagatatttttattgtaacccagataccattgcttcacaagatggagtccattgccttacctgtgcaataatgcttcttaataccgatctacatggccacaatattggaaagaagatgacctgtcaggagttcattgcaaatctgcaaggggtaaatgagggtgttgatttctccaaggatctgctgaaagctctgtacaactcaatcaagaatgagaagcttgaatgggcagtagatgatgaagagaaaaaaaagtctccctcagaaagtactgaggagaaagctaacggaacacatccaaagaccatcagtcgtattggaagtactactaacccatttttggacattcctcatgatccaaatgctgctgtgtacaaaagtggattcttggctcggaaaattcatgcagatatggatggaaagaagactccaagaggaaaacgaggatggaaaaccttttatgctgtactgaagggaacagttctttacttgcaaaaggatgaatacaagccagaaaaggccttgtctgaagaggacttgaaaaacgctgtgagtgtgcaccacgcattggcatccaaggccacggactatgagaagaaaccaaacgtgtttaaacttaaaactgccgactggagggtcttgctttttcaaactcagagcccagaggaaatgcaagggtggataaacaaaatcaattgtgtggcagctgtattttctgcaccaccatttccagcagcaatcggctctcagaagaagtttagccgcccacttctgcctgccactacaacaaaactgtctcaggaggagcaactgaagtcacatgaaagtaagctgaagcagatcaccaccgagctggccgagcaccgctcatatccccccgacaagaaggtcaaagccaaggacgtcgatgagtacaaactgaaagaccactatctggagtttgagaaaacccgctatgaaatgtatgtcagcattctcaaggaaggaggcaaagagctactgagtaacgatgaaagcgaggctgcaggactgaagaagtcgcactcgagtccttcgctgaacccggatacttctccaatcactgccaaagtcaagcgtaacgtgtcagagaggaaggatcaccgacctgaaacaccaagcattaagcaaaaagttacttagagtccatctgcggccaggaagtgctggtcatggagcaaaatagggtttttcaagatctttctggtaatccgtgaatatatttaaaaaaaaaaagtctgtgacaaaacggtgcattagtaattttttctattgtatatttttgttagtttctgtacagattgtctttgctcttgatttcttttgctttgatgatttttgcaacttgatagctaatgcaccttttctgtgaggaggaggggatcgtgatttcagaatgaattatgtatcccttctcttttggttttctcttgtttgcagtctgctcagttgttttatgtattctcatatcaactgttaaacttttttttaaggttaaagaatttaatccattgtgaaacacttaactggacaaactgtagttttagtaaattctagctggagttaatatacgcctttatatgtgaaatcttgcccagtcacagaggtagaattgagcactcacagatgctccagtaagaatcacagtgctgggaatctagttgctccaatatgaggcagcttcatgtgcagcttagcacttgttgttgagatcggaccctgctggaagcagggaaaagaagcgtgaagatcgtaggattgagaacttagggaagcacattagcttgcttgaagtgctgattccatttcagccaagcaagggaaagaggaagtggagtcattttgcctttgaaggctgaggaaagattgatacccagttaattttgtttgctaaaggatgggggcaataatcggcccttgaggagctgcagcagtaggcatgtgctcagtctgcaggaattgttacctcactcccacagggtctagactagaaatccatcatctctatcgttgatatccttccatccaggaatagatttttcttactctacatatgtgtgtgtgcgtgcgtgtgtgtgcgtgtgtgggcatggggttgtgtcctggttgtgatattgaggtcttccttcctaacaaattaatactaaaatgaaacagcttttcttgtgtccttaagacaaaataaggaaggaaaacgtagctgcagttgtccacgatggatattggttctttaaaatatatctgaaagtagtagtcagaatgaattatggttggaaaactgaggaatcttctggttgcaggtgcaaagtgactttgtttattcttgtctcagtctccttgatagccacttcactctgctactactcaactttctcctaaaaatacttcatctattttcagtcctttctttctgtctactcaaaatggttctattaactttgcagtcatgagcttgttccagttacagtccctttgaagttcagggtgataaacagaatattcttctgtagaggaagagaaaggagtgaaagtttagcccactgagacctagagctttgtgatttcctaaccttgaaactctgtaatccctaaagttaaaatctccgcaagtggcacaacttcagaactaatagtatcactttgatttttctttttcctcccttagaaagtttctctagttctatagtttatttgttgaaggtactatgaccaaagaatcagctgctctacaggaatagcatggttccagtgaattagagaaaacctgctgtaaagccatggtagtgtctaagtggtatgttattatgatgtactagcatttatttacagaattatttattaacgtttacttccttcccctctgtaaatgtccatgactattgcccagagaaggcttacccctctctagggttgcagttgctttctttgtaataagtattttgccacacctgtaaaaaaaaaaacctcacttttaactctctgccttgtttgggtaaaggcagtaactaagtttatgtttcagaactgcaaaacaaacaggatagttaccaatatggcccatgtgtcagattgatttttgtagcctctcactgaatccaacatatccacaagcaagttatctgtctttctacctgataatctaaattatcaggatatttgttttctgcctaaatgtttatactaagccgaggggagagaggtacctagaccatgtcatctacgagcttcagtaactaaagaaaaaggaacttccctgagtggcttgaatgtgtttgcccacagtctatatctatgtatatagaatgtctgtatgtattttacttatttaatatacattgaatggtaccttgctacagtatttctgacatttagagtagtgttgaaatactcggctagcatcagcaccactatagcactgtccgtgtcatatgagtcactaatattaactccagggacttctggataggctaatagatcattggatacgaagggctcttttgaagcttcagtataccatgtttgcatagtttatctttaaaaacaactttaaaggttcttttgtgagccaggatctcagactgccgtagcatgatgctgtccatctttagcgcatgggctgagaacacctcttccctgaggcttctgaaggttgctgtctgtcatgagtgcatgaaggaggccaagagtttatgctatgggaggaaccagtcactgatttgcctagattctgagagtctggcccatagccaaccacattttcctttgggataatttatttcctgtggcatctagccagaagaaattgaggatgtttcctttcacagctgctccaagcctgttgcccaattcacggtacaagggagcaccccttccctttcctctgaaggtacgccacccacctccgtcgcccacctcagcgcccaggagccttgggacttccttccatatgataaatcattcttcttcacgtcaatacacttcatattaatttctagtacagaaaatcttgacagctatcagaatgccttggtcatagtgttgttgcaaaattgaccatacaggtggcccatgtataaaatctgaattttaggggtttgtccccacctcgcatgctggcttttacagggaggtgtctgggattcctcattagcaatcaaaacttaattactgggatgcagagtccttactttatcgccagcccgtaggcatttctgaagtgcacttttttgaaacatcattttgctaactctcagcagtgtctaattaaactgagcaatacttttgtgaattttaattaatctcagcaaaaccatgatgggagagagtcctctgatggaaatgtagtccctggattatgtgtaacctttttattgctcttagatgcagaggatagaaagcattttttggtgcagtggtcttgtggcaaacacaagaccctctatgcgtctccaactgttatcctaatctagaaaatgaggactggcccctgggcaaaagtgacatgaggaatttactctggaagaggaaaatctgggtggctttccaaggctaagataggtttgtatttcaccctgtggccaagctacagaacttctgagattgtggaagaatttttgcaaccagcagggaaagaggcctcttactgcctaaacacaaagttacactgagcttttctactgtcctttgcctattgctccctctatcatgtaaagatctgggaaggatgagaggcagggcctgcttgtcatgagctgcactcttttctttttaactaatcattgacaattggaagaaaattgacgttaaagaagtttctccattgtcttactaacaaaaccttttgggtttcattaattgtccttgaaattgagttcctttggcatttttccttgcagtcatcagttaagcatgttgcatcctgaattcacagaagtttagctttgcaggtttgaatctctgtaatttaactcccgtggacttggtcgagttttcagcaggttgggagccacctctcttcatttcagcagtgagtcatcccttgacttttcaaatgacagaattttttccaattgtaaaattagcactgtaaaacaaagaaccaaagtggcatcctaagagttgttaaacctgaagtctagtttatgaggaattgtccaagttggagtttaaatagtatctgcttttgtctcaaagcatctaagttattctgacagaaaatggtaagtcagctttgcaggcagatgcgcctctgggcctcctaccttgctccacagctttctggccatcttgtctcccaggccatgccactgctctgccacatgtcagcaaatttctttccaccagtcttatagcatcttacatgatcaaatcatcacagaataaccccgtgatagattattgatagcaatagagaggggctttgtcactgatttttctctcagattccttttccatctctcatccataaaggaaggactgaaatccaaaggcattctccttttgtacctacagtatccagaacccacgtgggcagccttctgcttatgacaataattggcccattgcatgcagagagaatgtcttcatagagagaatgtcattaaatacttgaatctgcatgacagtttgacttgaatgcaacagcaggaaaattttgcaagttacataattgtatatacagtaggttttcttaagtctcttcggttcatcctttgtaatttgtgtgtgtatctgtagtattgcaggcttttggagactattcttacaggcagtatgtcagtcatcaaagaaaatgctgtcacctgccattgttgtatttgtgggtatttatagttgtatgtatgtaaatgcatcagtgtgtagattgcatatcagtgtatggtacatgtacatcaaaattatttttgtccttaatcagtgtgatatgaaaagcaagtacaacctcataggactgattatataatgaagttgttgagagtatatatagtggtattgttttattaaacttaaactcaaataatattttgattaaaatttttaataagactttatgctagaaaattctttgagctttgaatcaccagggcaaaaatgactttcaactaaccttgtgaatcttttgcagtgtactgtgtgcaataccaagggcatagctccctgtaatttgggaaatacagaaagaaaagaaaaaaaaaaaaaaaggcagcctgtgcagtcttagtaactttagtattaagagcacttaaagtcaaactgacaattttgggcttattacaaaatgtgatgctttaaagcacacgttctttattgttgttgtaattagtccataaaaaa

SEQ ID NO: 57152 - DNA, 4122 bp, Homo Sapiens
tttgtcatcagctcgctctccattggcggggagcggagagcagcgaagaagggggtggggaggggaggggaagggaagggggtggaaactgcctggagccgtttctccgcgccgctgttggtgctgccgctgcctcctcctcctccgccgccgccgccgccgccgccgcctcctccggctcttcgctcggcccctctccgcctccatgtgccggatagcgggagcgctgcggaccctgctgccgctgctggcggccctgcttcaggcgtctgtagaggcttctggtgaaatcgcattatgcaagactggatttcctgaagatgtttacagtgcagtcttatcgaaggatgtgcatgaaggacagcctcttctcaatgtgaagtttagcaactgcaatggaaaaagaaaagtacaatatgagagcagtgagcctgcagattttaaggtggatgaagatggcatggtgtatgccgtgagaagctttccactctcttctgagcatgccaagttcctgatatatgcccaagacaaagagacccaggaaaagtggcaagtggcagtaaaattgagcctgaagccaaccttaactgaggagtcagtgaaggagtcagcagaagttgaagaaatagtgttcccaagacaattcagtaagcacagtggccacctacaaaggcagaagagagactgggtcatccctccaatcaacttgccagaaaactccaggggaccttttcctcaagagcttgtcaggatcaggtctgatagagataaaaacctttcactgcggtacagtgtaactgggccaggagctgaccagcctccaactggtatcttcattatcaaccccatctcgggtcagctgtcggtgacaaagcccctggatcgcgagcagatagcccggtttcatttgagggcacatgcagtagatattaatggaaatcaagtggagaaccccattgacattgtcatcaatgttattgacatgaatgacaacagacctgagttcttacaccaggtttggaatgggacagttcctgagggatcaaagcctggaacatatgtgatgaccgtaacagcaattgatgctgacgatcccaatgccctcaatgggatgttgaggtacagaatcgtgtctcaggctccaagcaccccttcacccaacatgtttacaatcaacaatgagactggtgacatcatcacagtggcagctggacttgatcgagaaaaagtgcaacagtatacgttaataattcaagctacagacatggaaggcaatcccacatatggcctttcaaacacagccacggccgtcatcacagtgacagatgtcaatgacaatcctccagagtttactgccatgacgttttatggtgaagttcctgagaacagggtagacatcatagtagctaatctaactgtgaccgataaggatcaaccccatacaccagcctggaacgcagtgtacagaatcagtggcggagatcctactggacggttcgccatccagaccgacccaaacagcaacgacgggttagtcaccgtggtcaaaccaatcgactttgaaacaaataggatgtttgtccttactgttgctgcagaaaatcaagtgccattagccaagggaattcagcacccgcctcagtcaactgcaaccgtgtctgttacagttattgacgtaaatgaaaacccttattttgcccccaatcctaagatcattcgccaagaagaagggcttcatgccggtaccatgttgacaacattcactgctcaggacccagatcgatatatgcagcaaaatattagatacactaaattatctgatcctgccaattggctaaaaatagatcctgtgaatggacaaataactacaattgctgttttggaccgagaatcaccaaatgtgaaaaacaatatatataatgctactttccttgcttctgacaatggaattcctcctatgagtggaacaggaacgctgcagatctatttacttgatattaatgacaatgcccctcaagtgttacctcaagaggcagagacttgcgaaactccagaccccaattcaattaatattacagcacttgattatgacattgatccaaatgctggaccatttgcttttgatcttcctttatctccagtgactattaagagaaattggaccatcactcggcttaatggtgattttgctcagcttaatttaaagataaaatttcttgaagctggtatctatgaagttcccatcataatcacagattcgggtaatcctcccaaatcaaatatttccatcctgcgcgtgaaggtttgccagtgtgactccaacggggactgcacagatgtggacaggattgtgggtgcggggcttggcaccggtgccatcattgccatcctgctctgcatcatcatcctgcttatccttgtgctgatgtttgtggtatggatgaaacgccgggataaagaacgccaggccaaacaacttttaattgatccagaagatgatgtaagagataatattttaaaatatgatgaagaaggtggaggagaagaagaccaggactatgacttgagccagctgcagcagcctgacactgtggagcctgatgccatcaagcctgtgggaatccgacgaatggatgaaagacccatccacgctgagccccagtatccggtccgatctgcagccccacaccctggagacattggggacttcattaatgagggccttaaagcggctgacaatgaccccacagctccaccatatgactccctgttagtgtttgactatgaaggcagtggctccactgctgggtccttgagctcccttaattcctcaagtagtggtggtgagcaggactatgattacctgaacgactgggggccacggttcaagaaacttgctgacatgtatggtggaggtgatgactgaacttcagggtgaacttggtttttggacaagtacaaacaatttcaactgatattcccaaaaagcattcagaagctaggctttaactttgtagtctactagcacagtgcttgctggaggctttggcataggctgcaaaccaatttgggctcagagggaatatcagtgatccatactgtttggaaaaacactgagctcagttacacttgaattttacagtacagaagcactgggattttatgtgcctttttgtacctttttcagattggaattagttttctgtttaaggctttaatggtactgatttctgaaacgataagtaaaagacaaaatattttgtggtgggagcagtaagttaaaccatgatatgcttcaacacgcttttgttacattgcatttgcttttattaaaatacaaaattaaacaaacaaaaaaactcatggagcgattttattatcttgggggatgagaccatgagattggaaaatgtacattacttctagttttagactttagtttgttttttttttttcactaaaatcttaaaacttactcagctggttgcaaataaagggagttttcatatcaccaatttgtagcaaaattgaattttttcataaactagaatgttagacacattttggtcttaatccatgtacacttttttatttctgtatttttccacttcactgtaaaaatagtatgtgtacataatgttttattggcatagtctatggagaagtgcagaaacttcagaacatgtgtatgtattatttggactatggattcaggttttttgcatgtttatatctttcgttatggataaagtatttacaaaacagtgacatttgattcaattgttgagctgtagttagaatactcaatttttaatttttttaatttttttattttttattttctttttggtttggggagggagaaaagttcttagcacaaatgttttacataatttgtaccaaaaaaaaaaaaaaggaaaggaaagaaaggggtggcctgacactggtggcactactaagtgtgtgttttttaaaaaaaaaaatggaaaaaaaaaagcttttaaactggagagacttctgacaacagctttgcctctgtattgtgtaccagaatataaatgatacacctctgaccccagcgttctgaataaaatgctaattttggaaaaaaaaaaaaaaaaa

SEQ ID NO: 57153 - DNA, 10663 bp, Homo Sapiens
atgtcggtgggcgagctctacagccaggcgggaggtgacgggagacccccctccgcggtgtcctcctcgtcactgtcctcggagtccctaacttcggttggcggagaaagtttggcggttccgggaacgcccgcactgaccggccacccggctcctagaggttccgcagcgccacggctcagcaccaagccagggctgtcgccccctccccgccgcgcccctcactttcgttgcctgggctcggctccaaccgagttccccgaacggcagggcgaccctgccagctctgagcgccgtgcgcgggacgggcccccgcggtgctcccgctgctgtcccctgtccccgccgtggaccccaccccaggggctctgcggcgccggctctcgagggcgcgcctccgaggcgtcctttcctcccgcatacccacaacagggaaccctggacttgggagaggtgggggttctggacttggtggagagggaggagacaacctggcgtgagggcgcggcggctggatggagtgaggtgcctatgcacacgcctccatgcagagttgtgtgtgcgtgtggtgtccacgcgcgttgcgtgggtatgcgattcccgggacacccgcccgggccaacaggtctgggctgggtaggaacagtcacttccgcgtccttacctggcgatcacacgcggctgtctagcccatgtgggagcccttcggctccgtgggctggccacccttctaagtttgaggaattattcaactctcccattcctcctggaggggagcagggccgggatgagttcatgctcaggaaggtggccgcggaggctgtcacctggctgggggtggggccgcagcagcctcaaatacagcttccgagcccaccaggggccacctgtgcagcgatcagggatgggcgacggcctctgggggaggaggggaggagtgaggtttttctggatggagaaagagcaccagtcagtgccagacactttcagggtgatgtcaaacttttcattggatctgtgtgttgctggaccattgaggaggttccttacctggcttttctccacctggatcgtattcctgctcaaagacaagaagaagagagcagagaaagagcccagtgctttaggaggaatcttcagctctggtttggtttgctgatccctagacctggaaaagagaggggagatgcatgcatagtatgtggcttttggcccccagtgactgtgcctgagcaacagctagtaccagtgggagcccagcccaataaatgtgaagggaagatgaccaacagcacaccaatgggaatgttcttgatttgggctccccaaatttgcaggactaatcatcaccactgggttcaggatgcggtgtctgggcccatgaacactccttcagacagcggtacctgtagaaatgattaccagtgttcctgttcttggtcccctaatcacaggaatggacagggagtttatactgccagctatcaatgcacaagggtctggatccctgaccctgatgaggtatggcgctcagctgagttaaccaaggactacaaagaaggagacaagagcctacagctcagactggaggatgaaacgattctggaatacccaattgatgtacaacgcaaccagctgcccttcttacggaatccagatatcttggtgggagaaaatgacctgactgcccttagctatcttcatgagcctgcagttttgcataatttgaaggtccgtttcctggagtccaaccatatctacacttactgtggtatcgtacttgttgccattaatccttatgaacagttgccaatctatggacaagatgtcatctatacctacagtggccaaaacatgggagacatggacccccacatctttgctgtggcagaagaagcctacaagcagatggccagagatgagaagaatcagtccatcatagtcagtggggagtctggagccgggaagacggtatcagccaagtatgccatgcgctatttcgccaccgttggtggctcggccagtgaaaccaacatcgaagagaaggtgctggcatccagtcccatcatggaggccattggaaatgccaagaccacccgcaatgacaacagcagccgttttggcaagtacatccagattggctttgacaaaaggtaccacatcatcggggccaacatgaggacttacctcttggagaagtccagagtggtcttccaggcagatgatgagaggaattaccacatcttttaccagctctgtgctgctgccggtcttccagaatttaaagagcttgcactaacaagtgcagaggactttttctatacatcacagggaggagacacttccatcgagggtgtggacgatgctgaggactttgagaagactcgacaagccttcacactcctcggagtgaaagagtcccatcagatgagcatttttaagataattgcttctatcttgcaccttggaagtgtggcgattcaggctgagcgtgatggtgattcctgtagtatatcaccccaggatgtatacctaagcaacttctgccgactgctaggggtggagcacagtcagatggagcactggctgtgtcatcgcaagctggtcaccacctcggagacctacgtcaagaccatgtccctgcagcaggtgatcaatgcgcgcaacgccctggcgaagcacatctatgcccagttgttcggctggattgtggagcacatcaacaaggccctgcacacctccctcaagcagcactccttcatcggggtcctggacatctatgggtttgagacatttgaggtaaacagctttgagcagttctgtatcaactatgcaaatgaaaagctccagcagcagttcaactcgcatgttttcaaactggagcaagaagaatacatgaaggaacagatcccttggaccctgattgatttttatgataaccaaccttgtatcgacctcattgaagccaagctgggtatcttggacctgttggatgaagaatgtaaggtccccaaaggaactgaccagaactgggctcagaagctctatgaccggcactccagcagccagcacttccagaagccccgcatgtccaacacggccttcatcatcgtccactttgcagacaaggtggagtacctctctgatggttttctggagaaaaacagagacacggtgtatgaagagcagatcaatatcctgaaggccagcaagttcccactagtggctgacttgtttcatgatgacaaggaccctgttcctgccaccacccctgggaaggggtcatcttcgaagatcagcgtccgttctgccagaccccccatgaaagtctccaacaaggagcacaagaaaaccgttggccaccagttccgtacctccctgcatctgctcatggagaccctgaatgccacgacacctcactatgtccgctgcatcaagcccaacgatgagaagctcccctttcactttgacccaaagagagcagtgcagcaactcagagcctgcggggtgttggagacgattcgaatcagtgcagctggctacccatccaggtgggcctaccatgactttttcaaccggtatcgggtgctggtcaagaagagagagctcgccaacacagacaaaaaggccatctgcaggtctgtcctggagaacctcatcaaggaccccgacaagttccagtttggccgcaccaagatcttctttcgagcaggccaggtggcctacctggagaagctgcgggctgacaagttccggacagccaccatcatgatccagaaaactgtccggggatggctgcagaaggtgaaatatcacaggctgaagggggctaccttaaccctgcagaggtactgccggggacacctggcccgcaggctggctgagcacctgcggaggatcagagcggctgtggtgctccagaaacattaccgcatgcagagggcccgccaggcctaccagagggtccgcagagctgccgttgttatccaggccttcacccgggccatgtttgtgcggagaacctaccgccaggtcctcatggagcacaaggccaccaccatccagaagcacgtgcggggctggatggcacgcaggcacttccagcggctgcgggatgcagccattgtcatccagtgtgccttccggatgctcaaggccaggcgggagctgaaggccctcaggattgaggcccgctcagcagagcatctgaaacgtctcaacgtgggcatggagaacaaggtggtccagctgcagcggaagatcgatgagcagaacaaagagttcaagacactttcagagcagttgtccgtgaccacctcaacatacaccatggaggtagagcggctgaagaaggagctggtgcactaccagcagagcccaggtgaggacaccagcctcaggctgcaggaggaggtggagagcctgcgcacagagctgcagagggcccactcggagcgcaagatcttggaggacgcccacagcagggagaaagatgagctgaggaagcgagttgcagacctggagcaagaaaatgctctcttgaaagatgagaaagaacagctcaacaaccaaatcctgtgccagtctaaagatgaatttgcccagaactctgtgaaggaaaatctcatgaagaaagaactggaggaggagcgatcccggtaccagaaccttgtgaaggaatattcacagttggagcagagatacgacaaccttcgggatgaaatgaccatcataaagcaaactccaggtcataggcggaacccatcaaaccaaagtagcttagaatctgactccaattacccctccatctccacatctgagatcggagacactgaggatgccctccagcaggtggaggaaattggcctggagaaggcagccatggacatgacggtcttcctgaagctgcagaagagagtacgggagctggagcaggagaggaaaaagctgcaagtgcagctggagaagagagaacagcaggacagcaagaaagtccaggcggaaccaccacagactgacatagatttggacccgaatgcagatctggcctacaatagtctgaagaggcaagagctggagtcagagaacaaaaagctgaagaatgacctgaatgagctgaggaaagccgtggccgaccaagccacgcagaataactccagccacggctccccagatagctacagcctcctgctgaaccagctcaagctggcccacgaggagctcgaggtgcgcaaggaggaggtgctcatcctcaggacccagatcgtgagcgccgaccagcggcgactcgccggcaggaacgcggagccgaacattaatgccagatcaagttggcctaacagtgaaaagcatgttgaccaggaggatgccattgaggcctatcacggggtctgccagacaaacagcaagactgaggattggggatatttaaatgaagatggagaactcggcttggcctaccaaggcctaaagcaagttgccaggctgctggaggctcagctgcaggcccagagcctggagcatgaggaggaggtggagcatctcaaggctcagctcgaggccctgaaggaggagatggacaaacagcagcagaccttctgccagacgctactgctctccccagaggcccaggtggaattcggcgttcagcaggaaatatcccggctgaccaacgagaatctggaccttaaagaactggtagaaaagctggaaaagaatgagaggaagctcaaaaagcaactgaagatttacatgaagaaagcccaggacctagaagctgcccaggcattggcccagagtgagaggaagcgccatgagctcaacaggcaggtcacggtccagcggaaagagaaggatttccagggcatgctggagtaccacaaagaggacgaggccctcctcatccggaacctggtgacagacttgaagccccagatgctgtcgggcacagtgccctgtctccccgcctacatcctctacatgtgcatccggcacgcggactacaccaacgacgatctcaaggtgcactccctgctgacctccaccatcaacggcattaagaaagtcctgaaaaagcacaatgatgactttgagatgacgtcattctggttatccaacacctgccgccttcttcactgtctgaagcagtacagcggggatgagggcttcatgactcagaacactgcaaagcagaatgaacactgtcttaagaattttgacctcaccgaataccgtcaggtgctgagtgacctttccattcagatctaccagcagctcattaaaattgccgagggcgtgttacagccgatgatagtttctgccatgttggaaaatgagagcattcagggtctatctggtgtgaagcccaccggctaccggaagcgctcctccagcatggcagatggggataactcatactgcctggaagctatcatccgccagatgaatgcctttcatacagtcatgtgtgaccagggcttggaccctgagatcatcctgcaggtattcaaacagctcttctacatgatcaacgcagtgactcttaacaacctgctcttgcggaaggacgtctgctcttggagcacaggcatgcaactcaggtacaatataagtcagcttgaggagtggcttcggggaagaaaccttcaccagagtggagcagttcagaccatggaacctctgatccaagcagcccagctcctgcaattaaagaagaaaacccaggaggacgcagaggctatctgctccctgtgtacctccctcagcacccagcagattgtcaaaattttaaacctttatactcccctgaatgaatttgaagaacgggtaacagtggcctttatacgaacaatccaggcacaactacaagagcggaatgaccctcagcaactgctattagatgccaagcacatgtttcctgttttgtttccatttaatccatcttctctaaccatggactcaatccacatcccagcgtgtctcaatctggaattcctcaatgaagtctgaagatgcatgtttccagcattagtttgattcccaatgtgagcaagaaggaagtatatacagtaaagtaaattcaaggatctgttaaatctggtaaaagtagatcaaatcagagattgacagcctgtggagggtgctgaactatacagaattagacacaactatgtcattattttttgtacctactgctcagaataaaaacacttgaaatatggaagattttaagtttgatttcagtccaacacatatacataatttatagacaccaagcagtccccatagacatataaaaggtgtcaattctataaaacgaagctgcctagttttgatctttgcatagaactagagaatgtccaaattaaaataccaaatatatataagtcacataaattgccttcaaagggctttaacaaataatggtactaataaccatgataatggcatatactgacatttcccaaagtttgcaaaccataggtgtggttgagtttgtggtgagatgttttaagaacaaaaatatggggatgagacttctgagaaatattcccaaaatattttttaatggctgattatacacagacagtggtgtaactgacctccagaccagacattttgagtactggtttctgaagcaaaattagaagtgccagtcctcagtgtgctcaaacgcttttgtgttatcttgatttaatggaagagattattaaaatgctgctatcccaaactccaagtgagaaagatggaaaaatattttgtttctgatgctagtccatacactttccaagtcccacaaaactttcacaaaaatgtatataagctaaatattagaaacggataacaaacttgttttatttatagatgtaaaaaccaaacaagtcaatatgaaagcttttaatctcttaataccattaagcttccagtaagagcatcacataatgctctactgttccagaaaccaaatagtaaaacaaactaaagttcgcacatcagatcatctgaaaaaccttcaaaaataatcagttcagggatattatacaaaagtttgggttttttttttttaagagaataaaatggcttaggtcaactttcccttttcaggttattttcaacgtttttcaaatttagcacacaaaaaattgtaaatatctctcccacaaaataaggattttaaaaaagtaattcagtaatataacaggcttagatgtttgctgctcttagaattttttttaacttgtttttggtttcttcaaaagcaagcattcaattggaaacccatattctttccacacttttttttactgtcttttctgtatttcttgatagcagtatgctgttcccataagaaaaaaatggtatttgcaaatcatggaagaacagcctctgtattacattgagaaaataagatttatccatgaattggaagtagaacagcctgccttcaccctcttttactcaaccacccaacttaaaaggctcttggaaacacagcacactccacgctaccttctgcactgtgcccttagagcacagcttcctcagttgttctctgcatctcctggggcttaggccagtcttagcctgggttaaggctgctgacattgtgttccaatcagttgtcatgggcattatcccctctacatccacattaaacatgccggcttctcttgggcatcggcagagctgtgcctttttctttcagttacagttacataatcactgacgtccatgacacttacccatggatccatgtgctgacttcatttagaaggccaatctaaaacaactgggtttgtggctacctctttaaagttgtttgtgaaggataatttgttttttaatgcactttagtttgaaagtgagtctcttatgtaaggaccatccttaaaagaccaaaaatgccttgttagagtgttaaggagttttgacatgcagtggttccacaaacacagtggcttactatccttatacactgtcttataccatcattctctccatctctcttggtcactactctctgctgtcactggttaatcactaggtgccaagagcttactgaataaaagcttggcaattagaataaatggggagggaaggaccttatgaatagtccatttagcctaagaaatggcagatttagttcttctcttccaaaagataaaggtatatcctggaattgtacttaaaacttacagatgactaacaaatatatactttatatgtagttaatatttagatctgtcttatttaatacttggaggctagaagaagcatctttaggggaactatataatcttttgttagcattttctctgcattttaaaaaatcatttcaattcaaacatttatcagtgtcatgaaatcagtaatgactctttaacaattcaggtttgaactctgcattagatgtctctttaattttttaatatttaaaatttagttgacatttttttcaccaggtgcctttagcggttactaagataactgacatcagttgtttctctgaaataagtgttgctgtgggaataattttaatgttcaaggtgatatcatgggggagttttgtcttttaaaacattagaagcattttaaatattaagaatcaaatatttatagatcaaaacttgtgttttaagtattatacgggacctgtttacttatagtaaatgtgaatgtacacatgagttgttgctgaagctgacaagcatattacatacatgcattttccctgtgccctcatagttgcagttagagttccagtacctgtaggctcacctgggaggcagattagacccaaaggtagatgtttttcccctttccatgaagcatgtcagtgggagttgcttcctttgatttccctagtactaaattttaaggcttttgtaaaaacaaaacaaaactaggagcttggaacagttaaaaatcaacactgctaccatcaattcatcaaatatttacttagagctttcatacattaagattccagtaaccaataaattagaattcatttcttctgcataaagtaaattttcatacacttgacctactaagacagcaagggtgtcctaaattgaggcatttgtataatgcctgcataactaaatggtcactaaaatgggacagcatggggcaagaccttgtagttcttcacagaatatttgtggtcagtttctccaattaatttgctgcatgagccaaataaccataattcactttttatacccactggtgccataattagagaattagagggtgtagacagaggttaatgccaatgagaaacacaggacagggttttttttattataaaggtcattagatacaaaagattgtttttcaaaaaatttctaattctaacaaaggggatcaatcagaaatgaaactaagctactttctaaagtgacactgtatcagaataatccagatttgaatataacattttgccaccaactgacatttagatgaaggactgcctctctgaaagagttcagatcatattcaggggtgaatccaacaccatggaagaaagactactgatgaaaatattttcccactttgcacaaatctgtaaactacacctttgtttatagaaaaatgcttgtaatagtcactgtaatatttagctgtggataaaaatttgtggaaataaatacttttgaat

SEQ ID NO: 57154 - DNA, 4193 bp, Homo Sapiens
gcgactcgcgggtgtgacgttgaagatgtcggccttctgagccgactgcggtggtcaagagtgtaacacagccagcctcgaagacttccctctgagttggaatgataatgaccgaatcccgagaagttatagacttagaccccccagctgagacttcccaggagcaggaagaccttttcatagtgaaggtggaagaagaagactgcacctggatgcaggagtacaacccgccaacgtttgagactttttaccagcgcttcaggcacttccagtaccatgaggcttcaggaccccgggaggctctcagccaactccgggtgctctgctgtgagtggctgaggcccgagctgcacacgaaggagcagatcctggagctgctggtgctggagcagttcctgaccatcctgcctgaagagttccagccctgggtgagggaacatcaccctgaaagtggagaagaggcggtggccgtgatagaaaatatacagcgagaacttgaggaacgcagacagcagattgttgcctgccctgatgtgcttcctcggaagatggcaacacctggagcagtgcaggagtcctgcagcccccatcccctgaccgtggacacccagcctgagcaagcgccacagaagcctcgtctcctggaggaaaatgcccttcctgttctccaagttccttcccttcccctgaaggacagccaggagctgacagcttcacttctctcaactgggtcccagaagttggtgaaaattgaagaggtggctgatgtggctgtatccttcatcctggaggaatgggggcatttggaccagtcccagaagtccctttatagggatgacaggaaggagaactatgggagtattacttccatgggttatgagtccagggacaatatggagctcatagtgaagcagatttctgatgactctgaatcacactgggtggcgccagaacacaccgaaaggagcgttcctcaggatccagactttgcagaagtcagtgaccttaaaggcatggtacaaaggtggcaggtcaaccccactgtggggaaatcaaggcagaatccttcccagaaaagggatctggatgcaatcacagacatcagccctaagcaaagcacacatggcgagagagggcacagatgcagcgattgtggcaaattcttcctccaagcctcaaactttattcagcatcggcgcatccacactggagaaaaaccgtttaagtgcggagaatgtgggaagagctacaatcagcgggtgcacctcacccagcaccagcgcgtccacacaggggagaaaccctacaaatgtcaggtgtgcggaaaggctttccgggtgagttcccacctggttcagcaccacagtgtccacagcggagagaggccctatggctgcaatgagtgtgggaagaacttcggtcgccattcgcatctgatcgaacacctaaaacgccacttcagggagaaatcccagagatgcagtgacaaaagaagtaagaacacaaaattaagtgttaagaagaaaatttcagaatattcagaagcagacatggaactatctggaaaaacccaaagaaatgtttctcaagttcaagattttggagaaggctgtgagtttcaaggcaagctggatagaaagcagggaattcccatgaaagagatactaggacaaccatcttcaaagaggatgaactacagtgaagtcccatatgtccacaaaaaatcctccactggagagagaccacataaatgtaacgagtgtgggaaaagcttcattcagagtgcacatcttattcaacatcaaagaatacacactggggagaaaccattcaggtgtgaggaatgtgggaaaagctacaaccaacgcgtgcacctaactcagcatcagcgcgtccacacaggtgagaagccctacacctgtcccttatgtgggaaagccttcagagtgaggtcccaccttgttcagcatcagagcgtgcacagtggggagagacccttcaagtgtaacgaatgtgggaaaggctttgggaggcgttcccacctggctggacatcttcgactccactcccgagagaaatcccatcagtgtcgtgaatgtggggaaatcttttttcagtacgttagcctaattgaacatcaggtgctccacatgggtcagaaaaatgaaaaaaatggcatctgtgaggaagcatatagttggaacttgacagtgattgaagacaagaagattgagttacaagagcagccttatcagtgtgatatctgtggaaaagcctttggttatagctcagacctcattcagcattacagaactcatacagcagagaagccctatcaatgtgatatatgtagagaaaatgttggccagtgttcccacaccaaacaacatcaaaaaatctactccagcacaaaatcccatcaatgtcatgaatgtggcagaggcttcactctgaagtcacatcttaatcaacatcagagaatccatactggtgagaaaccttttcaatgtaaagaatgtggaatgaatttcagctggagttgtagcctctttaaacacctgagaagccatgagaggacagatcccataaataccttaagtgtagaggggtctctgttgtagaatagctcttaattttagagaaaccttcctggagggaaaccatactcctataatgagcaaagtaacaacttcaagcatttttccagcgttaccatcaaactcacaaataggttgaaatcctttagttataactcagcctttaggaacaccggagaacccacaataatagaaatcttttcgtgttccccattgagaaatgctttagttagcatcttcatgcttggaaatctagacaagaagagaatccatggatggacatggtcgaggaattcggaaagcctgcagttgacattcagtcttcacttgaaactcaaaactgacactaggaacagcttcatgagttcagtagaagtaagctttatttgtagcttctgccttgtttgacggcgtatctattcagggaagcgcacagtaaaagaattccttagcatgatgtctgttttggtacctcagcaatgaaccttttctagaaattattattccaaccactagaataccctagtcactattcccactttgagcattaacccctttgaaaagaaatggacttaaagtatctctgttttggcaaaattcaggttcaggggctggatggtatgtgtttctgctgccttattcaatccaccacttctctgtgaaacactctaccttgtttttggtttgattctactgatgtcagggtttagccggtagaaggagtagttcagtttgtcaattcaggagaaactgtactggtcagtcacatcttacggcgaagggagagggaccttaggggagcagagaagacaggcaaagttgtggactgtttgatcttgtattacccacaggaatgagggcagctaaacccatagaaggagttggaccaaggcgaattacgagtcctggtcccagcagtatgtgtgctgacttctgggtgccccagaaatagacctctcctgtagagtggtgatatacagaatgagtttcagtttgcattgcagctgggattgaaagtaatcagtcgtgagcaggcaggcaggaggtcctgttagccctgccttccaggaaggttggggtgggagttttgagtgggaaagaggatgacatgtgtgagagagttctgagcctgtttgctagggagagtgagtgagtgctcttgggcactgctcaggccgtttctgctgacttgcctggcttacaataaatgcccaataaatatttgttgaccatatgtgttgtacactgtggtgccctgtccagtcccctctaccaagctgagacccccatccccagctgctctgagtttgggctgcaagtgctcacagctcttgttctccagaaactggagaattgccctcaggagatgagagccatctcacctcacccaggagtcacttcctctctacaccccaacacctggttcatttgattaaagcggagaaaactccagggtgctatgactgctctggcacccttggatcaggccaagctagactttttctgagccttcatccgtgctaagctctctcccttctctatcctgtttcattccctccctcaaaggcgtttcccaaataaatcacactgtcaatc

SEQ ID NO: 57155 - DNA, 6345 bp, Homo Sapiens
gtaaggtctcggaagtacgaggcggaggggacgaaaaacggggggccagactgttgtggctgtggtggagacgagaaaccaggaagaagaggctcgcctcccactcggcgacagtaagcgaagcagccgaaggcgagcgccgacatcagcagctgccccctaaatcccgcccttcgtcttggcggcagcgggagactgagagacgcgcgcagcaggggcgggactggagaggggccccgcgcgcggatctcgcgagagcattagagggcggaagcgctatccgagcaggatgcggttcgtggttgccttggtcctcctgaacgtcgcagcggcgggagccgtgccgctcttggccaccgaaagcgtcaagcaagaagaagctggagtacggccttctgcaggaaacgtctccacccaccccagcttgagccaacggcctggaggctctaccaagtcgcatccggagccgcagactccaaaagacagccctagcaagtcgagtgcggaggcgcagaccccagaagacacccccaacaagtcgggtgcggaggcaaagacccaaaaagacagctccaacaagtcgggtgcggaggcaaagacccaaaaaggcagcactagcaagtcgggttcggaggcgcagaccacaaaagacagcactagtaagtcgcatccggagctgcagactccaaaagacagcactggcaaatcgggtgcggaggcgcagaccccagaagacagccccaacaggtcgggtgcggaggcaaagacccaaaaagacagccctagcaagtcaggttcggaggcgcagaccacaaaagatgtccctaataagtcgggtgcggacggccagaccccaaaagacggctccagcaagtcgggtgcggaggatcagaccccaaaagacgtccctaacaagtcgggtgcggagaagcagactccaaaagacggctctaacaagtccggtgcagaggagcagggcccaatagacgggcccagcaagtcgggtgcggaggagcagacctcaaaagacagccctaacaaggtggttccagagcagccttcccggaaagaccattccaagcccatctccaacccttctgataacaaggagctccccaaggctgacacaaaccagcttgctgacaaagggaagctttctcctcatgctttcaaaaccgaatctggggaggaaactgacctcatttctcccccgcaggaggaagttaagtcttcagagcctactgaggatgtggagcccaaagaggctgaagatgatgatacaggacccgaggagggctcaccgcccaaagaagagaaagaaaagatgtccggttctgcctccagtgagaaccgtgaagggacactttcggattccacgggtagcgagaaggatgacctttatccgaacggttctggaaatggcagcgcggagagcagccacttctttgcatatctggtgactgcagccattcttgtggctgtcctctatatcgctcatcacaacaagcggaagatcattgcttttgtcctggaaggaaaaagatctaaagtcacccggcggccaaaggccagtgactaccaacgtttggaccagaagtcctaacagaatggtatattcctctggaaaaagatgaacgtcaccaatggattgtgctgctctcgtttcagctttgatttttttgtccttgagaaccttgtcctccctgctgatttgtttctaaatcaaaagaaatgaagaaaaaagtactgtgacctgagagacaccctcctctagaatttagtggcgggtctgggctggcagaggtagggggctgctttgggctttgcacctgcactttggtgacattgttcttctgtgttccctttatttatgctggtggcttccatccgttcctcctctgagggtgagtggaggggtatatggaaacacggctatgaccaaagggagatcccagcctgggcaggctgcgctgctgaccaccctccctggggcccgggctctgtaggaaagttggtccttgactgtggcattgcactctgcactgtttctctctgcagacctaggggaaaactgcaggtggaagtgcttttctactaaggcctcttactttgggggggatgtgccctacagaagacatagaagatggggaaatgccaatgggcaaagagctactttgaatacataattctcttcaaagacttcagcagcaaaccaaaacagcaggttaaaaaaaaagatgcttttttgggtgcaagtctaacctgtctagcatgagatcttcttgattttctgattattttatgtagcttgagacaaagtgaatcaacttccacttagttgtaccgagcataaaacagaacttgggcttcctggcagtgaggccactgtcccatcacagatttttaaaataaatatgatttgaagtagtgtgatctttcacacaatcatactcagtaggaactttttgaaatagggcaagtttatgtttcatgcgagaaaacatgaaggagggttttggttttggtctgcagtttttccaaagggcttttatgagatacatttcccacaaagtccattttgcctttgttgcctaaaacagacaaaatagacttagatttattaatagaaactatactctctgccaattttacctcagtgtatttaatggtcctttaatctgatataagatgccaagggtatttgataaaaattcttcttccatgccatgtcaggagttaatacaaatgaagaaattccgtgggttcccctgggataagtgagggtagtgtcttggacaacactattgtttgaaggtttatcttttctaatcatgctctaccgcattgtagagagcctaaagagagttgtttctgagctgatctcagggaaatacaaataacttgggagatgagggaaataagatgaattctgtgctgtcaaggcagtaagtctgaagaaaggaccatgcttcttatattatcttccaccttgcttaaaacagcccatagctttgagttgacattttcattcttggcggatagcctactttatgaaggtaaggaatgaactcctacccttcttgggtcattctctgtactgatgcgttagtcttataatactttgcaccaacctgaggaatcttctaggcttctctagcatcccctaagactgtggctatttcacgtctctctccctgcctgccttccttttcccttcctttcccctcctcatgttttctggttgtgcccatctgtaccagctcctttccatccaccttcgtatgcacccagatttttctgttcccatctgtcctatttgttattcatcccgctgctcaacttctccagtatgttgcttcccttaagttgccattcattctcttcatgacttttactaactcacttcggtctctgtctgtcaactaaacttttctaaaggttaccagttatccaatcaccaaatccatggctttttctcaaagcttagtcttgtccttggcagaactggacactattgaccatccaaatggaaattcccctttcttggtgtctctgacaaatggtcctttgccttatcttgtgctggtggtgaagaggccctcaaagccaggcctctctattcctttgactgtctcctcagccattaacccattcttcatcctcggagtgagtgattcccaagtctttgtcttggcttaatccctaaagaacccagttctgctggtatcgaatagttcagcttggttgtcattgaaaggaatttctctcttctgtccatcagcctgtccctcccaactgtctaggacagtcttcggtcacctaaattcctaactgcagacttttgccctttttctctctcatcaccaaagtcccatccatttttttttaataaaagatcctcagctacagtctttccattttccttgcttctcttattgcacacccccagcccattttgcttctctcttggattttgttttttcagatccacatttattgggtttcctgtccagcttcttggaaaggagctcactcttggaaagactgatctttccaaaatattttccctggtctgaagctttggtgtgaacttctcaaggcttagagaatccagttacagaccttttggggttcaggatgctatagattgacaccctcctgcctgtttttctctgcatcccaacctggccaaggcccctcctgtggggtgcccatctgtgcctttattccggctgtgccctcgactttccagcttcccatgtttctttggttaggtttctctcccttccttctttctccttccccaatccgcctgtttcgtcagggcccagtttgtttcctcatacaccttcctcactaccccaccccacatggttgactctttccctcagctccaccagctcttcatcatgccactcatttcagaacttgagcaaaacagggcagtcaggatctgatgtctttctggtctccctaagaaaactaagctcttgagggacagcccttggcaatgctttcctatctgctgatcatggtgaccttccttaggacttccagagttcagttccttctggcagagaggttttctttctccatgccatatggatgtgactcaaatgaggggtcccacagcttttcctggctaccacttgctgtgaccttatacatgttggggtttgctcttaaagaggagagcaggaagaaaggttggtttcagaaaccaagagggtcggcagtggacgcgtacattttgtcacggagtccacagagctgagcttttgagcagactctgagaagtatcattgcttgtgttgaaagaatacaacaggatttaagtttctctttagaaattgcactgaagaaaggccgggcgcggtggctccccctgtaatcccagcgctttgggaggccgaggcggggggatcacgaggtcaagagatcgagaccatcctggccaacatggtgaaaccccgtctctaataaaaatacaaaaattagccgggcatggtgacgtgcacctgtagtcccagctactagataggctgaggcaggagaattgcttgaatccgggaggcggaggttgcagtgagccgagatcgtgccactgaactccaacctgccaatagagcgagactccgtctcaaaaaaaaaaaaaaaaaagaaagaaatagcattgaagaaaataccgcacatcagaggaaagcttattttctgcatggtgtcttttcaaagatagaatatttgaagcatgttttctagcgattgtgtggatgagggtgagctggctgaggcatcgctcaagctggggggtggtgtgtaagaagcacgtggagccacaagaggcacctcctatagtcagctaagggcttccctttctgcgcccagcttttgggtgaagggtgatttctattagacacatctgtgcttcagtcatagatgttaatagaggaagcagttttcctgctgcagattcctgaatagagttgctgaaagagtctacttctggactcaggggaagttgaaggccagtctgtgtagaaaggctgaggcaacggggaaagacctgacagctagttacatacgctctgacatagtactcccatgatggcttccagtgacacatgtgctgatagaattctaaacctctggaatttccctgctggcgacttctatggccgttgactgtacagggtaacctgatgccagatgctatgggcgtgatgagaactagagcattgcagcatggaggaaactgtgaggcaccagatcctgtgcttctgcaggccattttctgaaaacccctgttaggaaggttggatttggcgtgacttgcttgagcaagagtcctggggagagattttgaggtttaatttaacggtatatccagagctaacagtgactcaactcgtctagttctgcaagtcagatgtacacttagagtctctctgtgaagggtttgggtctgagctgtatagtatgtcaaactgccagtaagccagcccctcaccctctgatagatattcctttaatgcaccagacttcatgtttgataaatgattaatggttgaaattgtttctcttcttttgtgttttcccagttaatagatggtcactgtttccacaatgttttatactttcagctttttgtaacttaactataattacttaattttatttttttaaagcttgttgtggtctaatgagaagtatttttcagtgcataatgtttttctgagcttctgtaaatgccatcccaatgtggtttggttttgttgaacagaaaccaaaataaatttcaaaatgttaaagcaatggaaaaaaaaaaaaaaaaaaaaaaaaaaaaaa

SEQ ID NO: 57156 - DNA, 6431 bp, Homo Sapiens; identical to SEQ ID NO: 30510

SEQ ID NO: 57157 - DNA, 4266 bp, Homo Sapiens
cttcctctgccaccatggggaactgggctgtgaatgaggggctctccatttttgtcattctggtttggctggggttgaacgtcttcctctttgtctggtattaccgggtttatgatattccacctaagttcttttacacaagaaaacttcttgggtcagcactggcactggccagggcccctgcagcctgcctgaatttcaactgcatgctgattctcttgccagtctgtcgaaatctgctgtccttcctcaggggttccagtgcgtgctgctcaacaagagttcgaagacaactggacaggaatctcacctttcataaaatggtggcatggatgattgcacttcactctgcgattcacaccattgcacatctatttaatgtggaatggtgtgtgaatgcccgagtcaataattctgatccttattcagtagcactctctgaacttggagacaggcaaaatgaaagttatctcaattttgctcgaaagagaataaagaaccctgaaggaggcctgtacctggctgtgaccctgttggcaggcatcactggagttgtcatcacgctgtgcctcatattaattatcacttcctccaccaaaaccatccggaggtcttactttgaagtcttttggtacacacatcatctctttgtgatcttcttcattggccttgccatccatggagctgaacgaattgtacgtgggcagaccgcagagagtttggctgtgcataatataacagtttgtgaacaaaaaatctcagaatggggaaaaataaaggaatgcccaatccctcagtttgctggaaaccctcctatgacttggaaatggatagtgggtcccatgtttctgtatctctgtgagaggttggtgcggttttggcgatctcaacagaaggtggtcatcaccaaggtggtcactcaccctttcaaaaccatcgagctacagatgaagaagaaggggttcaaaatggaagtgggacaatacatttttgtcaagtgcccaaaggtgtccaagctggagtggcacccttttacactgacatccgcccctgaggaagacttctttagtatccatatccgcatcgttggggactggacagaggggctgttcaatgcttgtggctgtgataagcaggagtttcaagatgcgtggaaactacctaagatagcggttgatgggccctttggcactgccagtgaagatgtgttcagctatgaggtggtgatgttagtgggagcagggattggggtcacacccttcgcatccattctcaagtcagtctggtacaaatattgcaataacgccaccaatctgaagctcaaaaagatctacttctactggctgtgccgggacacacatgcctttgagtggtttgcagatctgctgcaactgctggagagccagatgcaggaaaggaacaatgccggcttcctcagctacaacatctacctcactggctgggatgagtctcaggccaatcactttgctgtgcaccatgatgaggagaaagatgtgatcacaggcctgaaacaaaagactttgtatggacggcccaactgggataatgaattcaagacaattgcaagtcaacaccctaataccagaataggagttttcctctgtggacctgaagccttggctgaaaccctgagtaaacaaagcatctccaactctgagtctggccctcggggagtgcatttcattttcaacaaggaaaacttctaacttgtctcttccatgaggaaataaatgtgggttgtgctgccaaatgctcaaataatgctaattgataatataaataccccctgcttaaaaatggacaaaaagaaactataatgtaatggttttcccttaaaggaatgtcaaagattgtttgatagtgataagttacatttatgtggagctctatggttttgagagcacttttacaaacattatttcatttttttcctctcagtaatgtcagtggaagttagggaaaagattcttggactcaattttagaatcaaaagggaaaggatcaaaaggttcagtaacttccctaagattatgaaactgtgaccagatctagcccatcttactccaggtttgatactctttccacaatactgagctgcctcagaatcctcaaaatcagtttttatattccccaaaagaagaaggaaaccaaggagtagctatatatttctactttgtgtcatttttgccatcattattatcatactgaaggaaattttccagatcattaggacataatacatgttgagagtgtctcaacacttattagtgacagtattgacatctgagcatactccagtttactaatacagcagggtaactgggccagatgttctttctacagaagaatattggattgattggagttaatgtaatactcatcatttaccactgtgcttggcagagagcggatactcaagtaagttttgttaaatgaatgaatgaatttagaaccacacaatgccaagatagaattaatttaaagccttaaacaaaatttatctaaagaaataacttctattactgtcatagaccaaaggaatctgattctccctagggtcaagaacaggctaaggatactaaccaataggattgcctgaagggttctgcacattcttatttgaagcatgaaaaaagagggttggaggtggagaattaacctcctgccatgactctggctcatctagtcctgctccttgtgctataaaataaatgcagactaatttcctgcccaaagtggtcttctccagctagcccttatgaatattgaacttaggaattgtgacaaatatgtatctgatatggtcatttgttttaaataacacccaccccttattttccgtaaatacacacacaaaatggatcgcatctgtgtgactaatggtttatttgtattatatcatcatcatcatcctaaaattaacaacccagaaacaaaaatctctatacagagatcaaattcacactcaatagtatgttctgaatatatgttcaagagagagtctctaaatcactgttagtgtggccaagagcagggttttctttttgttcttagaactgctcccatttctgggaactaaaaccagttttatttgccccaccccttggagccacaaatgtttagaactcttcaacttcggtaatgaggaagaaggagaaagagctgggggaagggcagaagactggtttaggaggaaaaggaaataaggagaaaagagaatgggagagtgagagaaaataaaaaaggcaaaagggagagagaggggaagggggtctcatattggtcattccctgccccagatttcttaaagtttgatatgtatagaatataattgaaggaggtatacacatactgatgttgttttgattatctatggtattgaatcttttaaaatctggtcacaaattttgatgctgagggggattattcaagggactaggatgaactaaataagaactcagttgttctttgtcatactactattcctttcgtctcccagaatcctcagggcactgagggtaggtctgacaaataaggcctgctgtgcgaatatagcctttctgaaatgtaccaggatggtttctgcttagagacacttaggtccagcctgttcacactgcacctcaggtatcaattcatctattcaacagatatttattgtgttattactatgagtcaggctctgtttattgtttcaattctttacaccaaagtatgaactggagagggtacctcagttataaggagtctgagaatattggccctttctaacctatgtgcataattaaaaccagcttcatttgttgctccgagagtgtttctccaaggttttctatcttcaaaaccaactaagttatgaaagtagagagatctgccctgtgttatccagttatgagataaaaaatgaatataagagtgcttgtcattataaaagtttcctttttatctctcaagccaccagctgccagccaccacgagccagctgccagcctagctttttttttttttttttttttagcacttagtatttagcatttattaacaggtactctaagaatgatgaagcattgtttttaatcttaagactatgaaggtttttcttagttcttctgcttttgcaattgtgtttgtgaaatttgaatacttgcaggctttgtatgtgaataattctagcgggggacctgggagataattctacggggaattcttaaaactgtgctcaactattaaaatgaatgagctttc

SEQ ID NO: 57158 - DNA, 3852 bp, Homo Sapiens
tgcccggccgaaaccaaaccgaggggtggggtggcgaggacagggtacgtcgcaggcttgtgcgggtcgggctcggacctgcgctgcctcgggatgtaaagtataacaagagggtcgggatgggcagcgtaggcctgtgaggcctgcgggtgcccctgtcccccagctccccccgcagccggctccgcagtggtccactccggttgccgggtgcggattcgggttccggaccgaaggctgtgtgttctccgccgtttattgtggccccgacaggccggggttactgtggcgaccacgagagcagctttggcgctatggaggagcccggggttacccctcaaccgtatttggggctgctcctggaggagctacgcagggttgtggcagcactgcctgaaggtatgagaccagattctaatctttatggttttccatgggaattggtgatatgtgcagctgttgttggattttttgctgttctcttttttttgtggagaagttttagatcggttaggagtcggctttatgtgggacgagagaaaaagcttgctctaatgctttctggactaattgaagaaaaaagtaaactacttgaaaaatttagccttgttcaaaaagagtatgaaggctatgaagtagagtcatctttaaaggatgccagctttgagaaggaggcaacagaagcacaaagtttggaggcaacctgtgaaaagctgaacaggtccaattctgaacttgaggatgaaatactctgtctagaaaaagagttaaaagaagagaaatccaaacattctgaacaagatgaattgatggcggatatttcaaaaaggatacagtctctagaagatgagtcaaaatccctcaaatcacaagtagctgaagccaaaatgaccttcaagatatttcaaatgaatgaagaacgactgaagatagcaataaaagatgctttgaatgaaaattctcaacttcaggaaagccagaaacagcttttgcaagaagctgaagtatggaaagaacaagtgagtgaacttaataaacagaaagtaacatttgaagactccaaagtacatgcagaacaagttctaaatgataaagaaagtcacatcaagactctgactgaacgcttgttaaagatgaaagattgggctgctatgcttggagaagacataacggatgatgataacttggaattagaaatgaacagtgaatcggaaaatggtgcttacttagataatcctccaaaaggagctttgaagaaactgattcatgctgctaagttaaatgcttctttaaaaaccttagaaggagaaagaaaccaaatttatattcagttgtctgaagttgataaaacaaaggaagagcttacagagcatattaaaaatcttcagactgaacaagcatctttgcagtcagaaaacacacattttgaaaatgagaatcagaagcttcaacagaaacttaaagtaatgactgaattatatcaagaaaatgaaatgaaactccacaggaaattaacagtagaggaaaattatcggttagagaaagaagagaaactttctaaagtagatgaaaagatcagccatgccactgaagagctggagacctatagaaagcgagccaaagatcttgaagaagaattggagagaactattcattcttatcaagggcagattatttcccatgagaaaaaagcacatgataattggttggcagctcggaatgctgaaagaaacctcaatgatttaaggaaagaaaatgctcacaacagacaaaaattaactgaaacagagcttaaatttgaacttttagaaaaagatccttatgcactcgatgttccaaatacagcatttggcagagagcattccccatatggtccctcaccattgggttggccttcatctgaaacaagagcttttctctctcctccaactttgttggagggtccactcagactctcacctttgcttccagggggaggaggaagaggctcacgaggcccagggaatcctctggaccatcagattaccaatgaaagaggagaatcaagctgtgataggttaaccgatcctcatagggctccctctgacactgggtctctgtcacctccatgggaccaggaccgtaggatgatgtttcctccgccaggacaatcatatcctgattcagcccttcctccacaaaggcaagacagattttgttctaattctggtagactgtctggaccagcagaactcagaagttttaatatgccttctttggataaaatggatgggtcaatgccttcagaaatggaatccagtagaaatgataccaaagatgatcttggtaatttaaatgtgcctgattcatctctccctgctgaaaatgaagccactggccctggctttgttcctccacctcttgctccaatcagaggtccattgtttccagtggatgcaagaggcccattcttgagaagaggacctcctttccccccacctcctccaggagccatgtttggagcttctcgagattattttccaccaggggatttcccaggtccaccacctgctccatttgcaatgagaaatgtctatccaccgaggggttttcctccttaccttcccccaagacctggatttttccccccacccccacattctgaaggtagaagtgagttcccctcaggtttgattccaccttcaaatgagcctgctactgaacatccagaaccacagcaagaaacctgacaatatttttgctctcttcaaaagtaattttgactgatctcattttcagtttaagtaactgctgttacttaagtgattacacttttgctcaaattgaagcttaatggaattataattctcaggatagtattttgtaaataaagatgatttaaatatgaatcttatgagtaaattatttcaattttattttagacggtataactatttcaatttgattaatccactattatataaacaatagtgggagttttatatatgtaatctttcaggtggggaggctttaaattctgaagtctgtgtctttatgccaagaactgtatttactgtggttgtggacaaatgtgaaagtaactttatgcttaaataaattatagttgatttaaagatttgtttggcattgataataataaaatcagtagtttttctataactatggctctattaacttttttccttttaccaataactttgaggtgcaaaactcaaacttatgtgggtcttttgtgttcaattatgttatgacaaatgtgctctctttcttgtaaatagacatgagtggcccaaagcaacaaattaatacacttttaaaagtcaaaattgattatattttaaagataaccaggatattatctaatggtgaattgtagaattttgatcttcttattcactgagtttcttgcacggtttctttattgcttttttttccccgcctgttcttttgtaaggtatttactattttctgtggaggatattgagatgtactacaggataactgtagtgaatgatgtgtcatcattttgagctttggactcaatatctttagtgtttccctaaatcagatttgtaggtcatgttaagcttcttgcacattaatatgattatggaaggaaaggcagtgaagcataactaataaacatcataatacttaacgttgcccagttggttgttttagtattagacttttttttcaatgccaaaagatagaagattaaatattcttgaataaagcagtgatatatattggaacacttcaccccagcatttccccaggtgttgtttggaacactgatcttgtgaagtatttttgctccctttctattctaaccctcacctcaaaaaaaaa

SEQ ID NO: 57159 - DNA, 5807 bp, Homo Sapiens
gcgcgcgcgagggcgttgggcgccgccgcgaggcggggaagcgcggggccgcggcggtgcgggttctagggcggcggccgtcgccgtcgcagcagcgccccgagcggggagggccgaggaggcccgacgagctggggatggagagtaccgggcccctcactgcctcagagcgcgtgtgcggctctgggcgcgcacagtgacggtgacggcacccctggcccggcagcgccgaggccgcttcgccagacagccagcggccggcggcaggccgggccatgagcggcaggggccgggccgggcctcgctgaccctggctccgcgcggcagcttccccagtttccgctccggtctctcggcatgagagtccgcccgggcccggggctgcggctgccccagacccgccgcacgctggcgcgctccgggcccgcggagccgcggtgctgatacctgcgccgcactgcgccgcccgcccgtccgctgtgtgccccgggggcgcggccatggaggtggtgggtgacttcgagtacagcaagagggatctcgtgggacacggggccttcgccgtggtcttccgggggcggcaccgccagaaaactgattgggaggtagctattaaaagtattaataaaaagaacttgtcaaaatcacaaatactgcttggaaaggaaattaaaatcttaaaggaacttcagcatgaaaatattgtagcactctatgatgttcaggaattacccaactctgtctttttggtgatggagtattgcaatggtggagacctcgcagattatttgcaagcgaaagggactctcagtgaagacacgatcagagtgtttctgcatcagattgctgctgccatgcgaatcctgcacagcaaaggaatcatccacagagatctcaaaccacagaacatcttgctgtcctatgccaatcgcagaaaatcaagtgtcagtggtattcgcatcaaaatagcggattttggttttgctcgttacctacatagtaacatgatggctgcaacactgtgtggatccccgatgtacatggctcctgaggttattatgtctcaacattatgatgctaaggctgacttgtggagcataggaacagtgatataccaatgcctagttggaaaaccaccttttcaggccaatagtcctcaagacttaaggatgttttatgaaaaaaacaggagcttaatgcctagtattcccagagaaacatcaccttatttggctaatctccttttgggtttgcttcagagaaaccaaaaagatagaatggactttgaagcgttttttagccatccttttcttgagcaaggtccagtaaaaaaatcttgcccagttccagtgcccatgtattctggttctgtctctggaagctcctgtggcagctctccatcttgtcgttttgcttctccaccatcccttccagatatgcagcatattcaggaagaaaacttatcttccccaccattgggtcctcccaactatctacaagtttccaaagattctgccagtactagtagcaagaactcttcttgtgacacggatgactttgttttggtgccacacaacatctcgtcagaccactcatgtgatatgccaatggggactgctggcagacgtgcttcaaatgaattcttggtgtgtggagggcagtgtcagcctactgtgtcacctcacagcgaaacagcaccaattccagttcctactcaaataaggaattatcagcgcatagagcagaatcttacatctactgccagctcaggcacaaatgtacatggttctccaagatctgcagtggtacgaaggtccaacaccagccccatgggcttcctccggccgggatcatgctccccagtaccagcagacacagcacagacagttggacgaaggctctccactgggtcttctaggccttactcaccttcccctttggttggtaccattcctgagcaattcagtcagtgctgctgtgggcatcctcagggccatgactccaggagtagaaactcctcaggttctccagtgccacaagctcagtccccacagtctctcttatcgggtgctagactgcagagcgcccccaccctcactgacatctatcagaacaagcagaagctcagaaaacagcactctgaccccgtgtgcccatcccatactggggctgggtacagctactcgcctcagcccagtcggcctggcagccttggaacttctcccaccaagcacttggggtcctctccacggagttctgactggttctttaaaactcctttgccaacaatcattggctctcctactaagaccacagctcctttcaaaatccctaaaactcaagcatcttccaacctgttagccttggttactcgtcatgggcctgctgaagaacagtcgaaagatgggaatgagccacgggaatgtgcccattgcctcttagtgcaaggaagtgagaggcagcgggccgagcagcagagcaaggcagtgtttggcagatctgtcagtaccgggaagttatcagatcaacaaggaaagactcctatatgtcgacatcagggcagcacagacagtttaaatacagaacgaccaatggatatagctccggcaggagcctgtggtggtgttctggcacctcctgcaggtacagcagcaagttccaaggctgtcctcttcactgtagggtctcctccacacagtgcggcagcccccacttgtacccacatgttccttcgaacaagaacaacctcagtggggcccagcaactccgggggctctctttgtgccatgagtggccgcgtgtgcgtggggtccccgcctggcccaggcttcggctcttcccctccaggagcagaggcagctcccagcctgagatacgtgccttacggtgcttcaccccccagcctagaggggctcatcacctttgaagcccctgaactgccggaggagacgctgatggagcgggaacacacagacaccttacgccatctgaatgtgatgctgatgttcactgagtgtgtgctggacctgacagccatgaggggaggaaaccctgagctgtgcacatctgctgtgtccttgtaccagatccaggagagtgtggtggtggaccagatcagtcagctgagcaaagactgggggtgggtggagcagctggtgttgtacatgaaagcagcacagctgcttgcggcttctctgcatcttgccaaagcccagatcaagtccgggaaactgagcccatccacagctgtgaaacaagttgtcaagaatctgaacgaacgatataaattctgcatcaccatgtgcaagaaacttacagaaaagctgaatcgattcttctctgacaaacagaggtttattgatgaaatcaacagtgtgactgcagagaaactcatctataattgtgctgtagaaatggttcagtctgcagccctggatgagatgtttcagcagaccgaagatattgtttatcgctatcataaggcagcccttcttttggaaggcctaagtaggattctacaggaccctgcagatattgaaaatgtgcataaatataaatgtagtattgagagaagactgtcggcgctctgccatagcaccgcaaccgtgtgagcagcaggctcatcccgtggaccggtggtgggaacgtgaggtgatgcctttgggattacagcttgagttctgtcaccccatccccaggaaactgtagcttcttaactggtgactaccaaagaacaagcagtgatttgaaaaaggaaaaacaatccaaaaactacatatttgtaggaaatctgccttattggagaaaatcaccctttccctttttctttgtagaagcaggagcaagagtgtttggctcccagtttggacttggtgaataaatgtaccttagaactaggataatcggtacagttattcttaaagataattaaaaatgaaacaaagtgagtgctcgtcactgggttcatcagagcagtgtgtgaaattccatgtgtttgctgaggtgtaaaggtaaatgtattcacccctcatccaggcagtttgatatttggagtaagtttgtttaaatctgagcatgcatctttaaacagctcaggaagaaatagcttaagaagaagtgaaacatggatcttggaagaaattttgaaatcttcaatttgatcctaatatggatacatgttaatcttccaaaatctttcatattgcactaatttattaaaacaactgtgtattggattttgtaatttaactaaggcacaatggacttgtttaaaatattttacttgattgtatacatagaccctttccagaattcacatgtaatctccagtgaacttttaagtggttaaaacttgtattcatgtgaacctttgcacattttttttttttacttctttatctacacctacagattttctcagtaatgtttttgttagcttttggttccattttttattgtgcatgcagaatgtacattgatgcctgtgaccttaggtttattaaaggctaggtttatttgggcagtattagaaacaaaatcatggatcaagagatactcttgataatttgaatagggccaaaacaaagttggtgacctaaaggcttgttagtgatgtggagttcctacatgcagtgagtggaaaatgaagttcgttttctcttaggaaaatgggcagctgtcttctgcctaatgtgtatttttcatgttaattctgacagttcaccaaatagctagtcatggagaatgcaggcagttaacttaatatccctccaggaatggttcctacgttgtgtattatttggtttcttttacttacctgcttgaatacttgaataaaccattcaccaattttaatccttttattttaatccttttacataaaataatctgaactctttgacaaattgcacagagctctttggcattaatctaattttaatgtactgataaaaacaaacatggttgtcctttactttgacaaagtaatgtaatttttaccttatttatctgtatgaaattccagtagttaatttgaacatttatttatatgacgtttgtatttttaggtctttaatacagtgtttctacctctcatttgtaactgcatgcattattcttgaaactaggtaaaactcactgaattgttgtgtaatagcctttttattattgcctgtacaaatgtatattaaggtaaaataaaactgacaaagtgtttctagggtgtagctgggtacatattaagtggcttgttgagccaggtacttccttagtgagtttagagacttggccatgaatatcctttgtcctgccccaggatttagatcttggctactgtcatgcaggcttccaggaacatagactgttttacctccacaaccctatttgttattagtgatactttattttatataatattttttattcacagtgaaatttcattcatgttctttcagttatcacctgtgttatctcagttgtaggtttattctatcctctcctcttcctctcccatttcttttttaacacaggatgaaacaggttcagagaggggaagtgattggcctaaagtcaggaactaggcaagtggtcaagccatgctttgtgactttcaagttaattcttcttgttcttgtatattaaaggtcttggggtagatggtgtgtgtgaaacagtgaagtctcaacagcagaaaagaacaaaatgtaaattcatgaataatggttctggttatacttccattatcaaggctaattaagagattttgccttgagtatagcaataataaacaaatgctttatgtttccctg

SEQ ID NO: 57160 - DNA, 6706 bp, Homo Sapiens
agcccacccgcctggctgcgcgtcccgggcccggcggctgaagaggagccgcggcgaggaacaagagtgtggtgagaggacgcggaaacacctgatatcccagcaaaggaagctgcagaggaagggtcctgccccgtgagcgaggacagcctccaggagcacagcggcttctcctaacatccccctggcagtgaattacggatgaccccgtatatgaggaggtgtggatgccgacacacggggagagctcctgagaccagcacacaggaccagtgtcctccccgtgaccttgcagttgtgtagccacaagtgggagccacagagaaggagagcccataaggggactcttttcaagacacggtgttaaatcaaggctctgaagttggggccacagccggtctcagctttctgtgttctgggggcgcggtgatatgacagcatgtgaagtgagtgggtgagcacggactcctgagagcgagggcgcacccaatacctagttatccggtactgcagagagacacctggtcagccagcgttgcaaagagggatagctagtcactcaggctgcagagagagacacctggtcacccaggctgcagaaacaaccgcagtcaactgcagctccagtcattgctggatgttggctgacgcggtcctggcgccagctggagatccattcaccaagactttctgggcagatttaaagtggctggggttcagaagttcagcaagttggacacacccctcctcgctggagaggagagggcaaaggcgaggcgggggagcagcgtgtgagattccccccttcacacacacaacaaagcgtggacacacagaagtgaaatctgatcgcgtgccaggaaaagctgtgaggctggaaaccccggagtaaggctcgaccttggccagacctgcaggctgcggaaccgggggcgcgcgggcgcagcgcagcacagcccggccatggagcacgcggtggccccctgcgtcctctacccagggactgagcccggggctgccggggagagcgagagcgagggcgccgcgtccccggcgcagacaccctgcagtctcggcgcgtccctgtgcttcagctccggggaagagtccccgccgcagtccctcgcctcagcggcggaaggcgcggccacctccccgccctccagcggtggcccgcgggtggtggagcggcagtgggaggccggcagcgcgggcgccgcgtccccggaggagctcgcgtcccctgaggagcgcgcgtgcccggaagagcccgcggcgccgtcccccgaaccgcgcgtttggcttgaggaccccgcgtcccccgaggagcccggggagcccgcgcccgtacccccggggttcggggcggtgtacggggagccggacctggtgctggaggtgtcggggcgccggctgcgcgcgcacaaggcggtgctggcggcgcgcagcgactacttccgcgcgcgcgcgtcgcgggacgtgctgcgggtgcagggagtgagcctgacggcgctgcggctgctcctcgccgacgcctacagcgggcgcatggcgggcgtgcggcccgacaacgtggccgaggtggtggccggcgcgcgccgcctgcagctgcccggcgccgcgcagcgcgccaccgacgccgtggggccgcagctgagcctggccaactgctacgaggtcctgagcgcggccaagcggcagcggctgaacgagctgcgcgacgccgcctactgcttcatgagcgaccactatctggaggtgctgcgcgagcccgccgtgttcggccgcctgtcgggcgcagagcgggacctgctgctgcgccgccgcctgcgcgccggccgcgcccacctcttggccgcggcgctcgggccggcgggggagcgcgcgggcagccggcctcagagcccctcgggggacgcggacgcgcgcggggacgcggccgtctactgcttccacgcggcggccggagagtggcgcgagctgacgcggctgcccgagggcgcgccggcgcggggctgcggcctgtgcgtcctctacaactacctcttcgtggcgggcggcgtggcgcccgcgggccccgacggccgcgcgcgcccgtccgaccaggtcttctgctacaacccggccacggacagctggagcgccgtgaggcccctgcgccaggcgcgctcgcagctgcggctgctggccctggacggtcacctctacgccgtgggcggcgagtgcctgctcagcgtggagcgctacgacccgcgcgccgaccgctgggcccccgtggcgccgctgccccggggcgccttcgccgtggcgcatgaggccaccacctgccacggcgagatctacgtgtccgggggctccctcttctatcgcctgctcaagtatgacccgcggcgcgacgagtggcaggagtgcccgtgcagcagcagccgcgagcgctcggccgacatggtggctctcgacggcttcatctaccgcttcgatctgagcggcagccgcggcgaggcgcaggcggcggggccgagcggggtcagcgtgtcccgataccactgcctggccaagcagtggagcccgtgcgtcgcgcccctgcgcctccccggcggccccacgggcctgcagcccttccgctgcgccgccctggacggcgccatctactgcgtgagccgcgcgggcacctggcgcttccagcctgcccgggaaggcgaggccggcggcgacgcaggccagggcggcggcttcgaggcgctgggcgcccccttggacgtccggggtgtgctcatcccgttcgctctcagcctgcctgagaagccgccccgaggggagcagggcgccccgtaggccggcggggtcggcgggcgtctccctcggcaggggtttgcggggcccaggtccctttgggcccgcggaggaggacgtggtggggagtcggggccgctggccacgctggtggtttggacacttcgaaggagccccgaggacgctctcagggccgctttcgctttgctttccttttgcttgtctttgcttctgggggtggatgccttgagacccaggaggtgtgcggatgggtcccttgacagacaggacacagagaaggctgtgggatccaaagggtcagcctcagggtacagtgggggttcctgaggcagcctgcagccggccccggggtgtcccgaaccccgcagagcaccgaggctgtgcgcaggagcctgggaccctcaagtaggtcgccgcgaactatcgggggaagcacgcagagaggggtcacgccttttatttttggcttgagatttaaaattataactgataagtaaagctctttctgatttagttgaaaatttcgtaccatgtgctcgctttggttggctcaactccaaaaagagtaatttaataagcattaaaggtaaaatctttgattaccagtaaggtttcttgttcaatatgcattggaagtatttccttccccacaccattgctactcaaactcacatgcctagagcagctccgtctcactgttggaccgagggggctttcatattttcagttgaaaggatgttaactgatgtagcgatgatttaccattatttaaattttaagtcttcagtggctaaatgtgaccaaacagcacatcataagtaggaaaaacttaccagggtgcttgtctatctaaaaagcaatttttgatagtccactctgtatgcccagccgctttcataatctggaacgagataaaatattcctaaaaagcggggaaaatcattttgctttgacagttctataaaaaaaagtgtaggcacattttaaacccactgtatatgatgttttcaatgtggatcgtgtagttctgatgagggagattaatttttacaatcagtattctaagtgtggccgagtgacagtgggcatagatttataacaaggaagtgacgtgcttatcaccatagatttgcaagtaaactgcatgtatttaattgtattgaattgagttccaaaataccctaatagaattaacacgaggctcactgcattgacagggtatgaggattaaaaacaaatcagttgggtcgtttctcatttaacattttacttttcaagtgtgtatacagaggacttactattatgactttgaggatgagatccatgctcacaaatagaggcgaacatttgaactccgaatccaacccattttcttactgtaagaggaaaagttactggaacgtaactagttgaaatcctgcctactttaatattatttgtttgttaatccagtaatgggaactgccatctctgtagaaatcagtgggtaattgaaaaataggttatgctttttaaagagtctgtggttatgagaggtctcagttaagtgtgtttagaagtgatcagcttgaaccttatgcatgactcgggggctggaatttatgatctgggttacggtatgttctggggacgtgtctgcttgcccatggttactcatgaactgaggggatagcttggcaacttggttaatcatcttgggaaagaaaaacagacttcatatcgcctgacttgattggccttttataggagtatactggagaaatggttgtagaaacagtatttacagcaaaaggaaacaaataatgttcattttaagcaatgtaccattcacactgtcctgccttttcctctagaattttattaatggtagaaatttttatatgaaatgggaccaggaccaggctaatattttcagtccttaaatatcaaactcatatgctgttatcactgtgattttacttgtgaaatcattcctgtaatgtttagtgtttgaaaatgaaatattgaaattaggtttccagagtaacactgtccccggaaaaggatatgagaagtggtggatgttggatgggggtggttgcacagtcctgtgcggttcccatggctttccagcgtttcatttagtgaaggaatgctcacactagatgtagcacagcttcctgtggggcccggcagcaaagccccaggtgctccctgtcacctcacaacaaaatgcactaagaaacgtaaagaataagaggaattaatacccaccattaaaggatgtccggccaacctattgtggaaatttatagaatagtatacaccacagttctgaatagtgatatcacataaaaatacatactagaggacctgccaagccatgagcagtgtttttgctttttgggggccagtccctggggtgtggagccgctagggtttgcacccatgaaacagaaaagccacaccctccaaggtgtggctttcattttgggactgctgcagggagggcagaggcattgctgagactgcctggcaacggctgatgccccaggtaggaccttttccatttcaaagtggtgttctaagtctgcgtccaacactgtgtaggaaaaaggttggtgcaaaaatattcctggtcatccacccattaaaatagttagatgaggctattgccttgatgacagctgtccacactcctcatgaaattaacccgtatgccggggcatttccaaatgtctgactcgtgaaattaacccatacgcaggggcctttccaaatgtctgaaaaggcagtggtgtcttttggggaaaatgttatgcatggaagcctgaccttttgcttagttgacagcaatcccttctgtattgccaatcaaggttcatttgagatgcagaggaatgagcttgagccttcctccttttccttccggttttattcttcctcttgggaacatccctccactccgcactgcttcctgcagctttgtagagctggatttggaacttcgggatttggtttctgagtctgtggaggcaccgacttctcctgtaagaaaatgaatgttgtggaaattctttggctacttaactaaaactcgtgactgtataagtttggctacaaataagtaagaaattaatcatctgctctgtttctgctaatttctggtgtcacttcagtaattctggtagcagccgttgaatctgtcagtctcttaggtaacttcctgtaaacgatttggaaataggatgttttcaacgttcttttgtcttttgctgaagtcaggatagattcaagacataatctcttgtaagatctaaatagagcaaatgtaaacaaaagtgcatttttgtattcttgttaattttagatgctttcctagcttacaaaaagttctatttttgggttaaaaatcaatcaactttctgatatttccccttctgcaatgttattgttcataagaaaacacgagctgaaaatggaaatctgcagttgtttcagttgtcttgaatttctttcagtggccacatcatttccacgttttccacatccgggaggaagcctggactgtgcagccttcgggcacccggcacagacactgtgctggcaggagcttcagacacgccaagtggatggatttggattgaacgcatatgaaacaggagacgggttctcatgtgagatcaaagctcctccaaagcctgttcaagctctaagcgattctcaaatgttaccatttattaaaggtaaactacacctgttgaaggccaagttcagggcagctgttgtgatctgtgtagttaatgtatttattaatgcttgacttttaaaatcctgggcataaatagtgcagagcctcgtatgtttgtcagttcatgccgagatgaaataaatcacgcagaaagtgccagtc

SEQ ID NO: 57161 - DNA, 8607 bp, Homo Sapiens
gcccccgcggcccggagtccatcccgcctcctccggcccggcggggccgacgagtccggaggggctgccgcgggagcccccaggtttccctagatgacaaataaacattccttttcctgcgtgaagatagtctgtggaaaccttggccatggcatcgatatcagagcctgttacattcagagagttctgcccgttgtactatctcctcaatgccattccgacaaagatccagaagggtttccgctctatcgtggtctatctcacggccctcgacaccaacggggactacatcgcggtgggcagcagcatcggcatgctctatctgtactgccggcacctcaaccagatgaggaagtacaactttgaggggaagacggaatctatcactgtggtgaagctgctgagctgctttgatgacctggtggcagcaggcacagcctctggcagggttgcagtttttcaacttgtatcttcattgccagggagaaataaacagcttcggagatttgatgtcactggtattcacaaaaatagcattacagctctggcttggagccccaatggaatgaaattgttctctggagatgacaaaggcaaaattgtttattcttctctggatctagaccaggggctctgtaactcccagctggtgttggaggagccatcttccattgtgcagctggattatagccagaaagtgctgctggtctctactctgcaaagaagtctgctcttttacactgaagaaaagtctgtaaggcaaattggaacacaaccaaggaaaagtactgggaaatttggtgcttgttttataccaggactctgtaagcaaagtgatctaaccttgtatgcgtcacggcccgggctccggctatggaaggctgatgtccacgggactgttcaagccacgtttatcttaaaagatgcttttgccgggggagtcaagccttttgaactgcacccgcgtctggaatcccccaacagtggaagttgcagcttacctgagaggcacctggggcttgtttcatgtttctttcaagaaggctgggtgctgagttggaatgaatatagtatctatctcctagacacagtcaaccaggccacaattgctggtttggaaggatccggtgatattgtgtctgtttcgtgcacagaaaatgaaatatttttcttgaaaggagataggaacattataagaatttcaagcaggcctgaaggattaacatcaacagtgagagatggtctggagatgtctggatgctcagagcgtgtccacgtgcagcaagcggagaagctgccaggggccacagtttctgagacgaggctcagaggctcttccatggccagctccgtggccagcgagccaaggagcaggagcagctcgctcaactccaccgacagcggctccgggctcctgccccctgggctccaggccacccctgagctgggcaagggcagccagcccctgtcacagagattcaacgccatcagctcagaggactttgaccaggagcttgtcgtgaagcctatcaaagtgaaaaggaagaagaagaagaagaagacagaaggtggaagcaggagcacctgtcacagctccctggaatcgacaccctgctccgaatttcctggggacagtccccagtccttgaacacagacttgctgtcgatgacctcaagtgtcctgggcagtagcgtggatcagttaagtgcagagtctccagaccaggaaagcagcttcaatggtgaagtgaacggtgtcccacaggaaaatactgaccccgaaacgtttaatgtcctggaggtgtcaggatcaatgcctgattctctggctgaggaagatgacattagaactgaaatgccacactgtcaccatgcacatgggcgggagctgctcaatggagcgagggaagatgtgggaggcagtgatgtcacgggactcggagatgagccgtgtcctgcagatgatggaccaaatagcacacagttacccttccaagaacaggacagctctcctggggcgcatgatggggaagacatccaacccattggcccccaaagcactttttgtgaagtccccctcctgaactcactcactgtgccttccagcctcagctgggccccaagtgctgaacagtggctgcctgggaccagagctgatgaaggcagccccgtggagcccagccaagagcaggacatcctaaccagcatggaggcctctggccacctcagcacaaatctctggcatgctgtcactgatgatgacacaggtcagaaagaaatacccatttctgaacgtgtcttggggagtgtgggaggacagctgactccggtctctgccttggcagccagcactcacaagccctggcttgagcagcctccacgggatcagacattgacgtccagcgatgaggaggacatctatgcccacgggcttccttcttcatcctcagagacgagtgtgacagagctcggacctagttgctcccagcaggacctgagccggctgggtgcagaggacgccgggctgctcaagccagatcagtttgcagaaagctggatgggctactcgggtcccggctatggcatcctcagcttggtggtctccgagaagtatatctggtgcctggactacaaaggcggcctgttctgcagcgcgttgccgggcgccgggctgcgctggcagaagtttgaagatgctgtccagcaggtggcagtctcgccctcaggagcccttctctggaagattgaacagaaatctaaccgggcttttgcttgtgggaaagtcaccatcaaggggaagcggcactggtacgaagccctgccccaggcagtgtttgtggccctgagcgatgacacggcctggatcatcaggaccagtggggacctatacttgcagacaggtctgagcgtggatcgcccttgtgccagagccgtaaaggtggactgtccctacccgctgtcccagatcacagcccggaacaatgtggtgtgggcgctgacagagcagagggccctcctgtaccgggagggcgtgagcagcttctgtccggaaggcgagcagtggaagtgtgacattgtcagcgaaaggcaagctttagaacccgtctgcataacgctcggggatcagcagactctctgggccctggacatccatgggaacctgtggttcagaactggcattatttccaagaagccccaaggagatgacgaccattggtggcaagtgagcatcacggactatgtggtgtttgaccagtgcagcttatttcagacgataatccatgccactcactcggtggccacagcagcccaagcccccgtagaaaaggtggcagataagctgcgcatggcgttttggtcccagcagcttcagtgccagccaagccttctcggggtcaataacagcggtgtctggatctcctcgggcaagaatgaattccacgtcgctaagggaagtctcataggcacctactggaatcatgtggttccccgtgggacagcttctgctacaaaatgggcctttgtgttggcttctgcagctcccacgaaggaaggaagcttcctgtggctgtgccagagcagcaaggacctgtgcagcgtcagcgcccagagcgcacagtcgcggccctccacggtgcagctgcctcccgaagccgagatgcgcgcctatgccgcctgccaggatgcgctgtgggcgctggacagcctcggccaggtgttcatcaggacgctctccaagagctgccccacgggcatgcactggaccaggctggacctctcccagctaggagctgtaaaattgacaagcttggcatgtggaaatcagcacatctgggcctgtgattccaggggtggagtttacttccgtgtagggactcagcctctcaatcccagtctcatgcttccagcctggataatgattgagccacctgtccagcccgccggggtcagcttggtcagcgtccattccagccccaacgaccagatgctgtgggtgcttgacagcaggtggaacgtgcacgtgcggaccgggatcaccgaggagatgcctgtggggaccgcctgggagcatgtgccagggttgcaggcctgccagctggcgctgagcaccaggaccgtgtgggcccgctgtccaaacggagacctcgcccggcggtacggcgtcacagacaagaaccccgccggggactactggaagaaaattcccggcagcgtgtcgtgtttcacagtgactgcgtcagatgagctgtgggctgtgggcccgcccggctacctcctccaacggctgacaaagacgttcagccactcgcacggcacccagaagagcagccaggccgccatgccccaccctgaggacctggaggacgagtgggaggtcatctgaaggagccctggccgagtcacgcggaggggcccggcgtctgtggcgggcacaggggcttcagagtgactccctggtggacgcgctgcctcaacacttgtccagacacctctggccaggttggacccgcacacttactttcatctatgttggtttctgtctcgttccagaacccacagcctccacccgtggctggcgtgattgctgcagcagtggcgcctcctagctcaggacagtggcgactgcccggctgcatgcactccgattacccacgtgctgccgtcctggtctcatccacagatagctccagcttttgttggtgggagtggtctccggaggcctcccagaaccaagggtagccgggcagctggtttggcccagggcctccttccacattagtagccccagggccagatggagccaaaggtcagctctctgcagcgcgggatgtgctcggtgatggctttgtcccatcataggggggtgtccccccagagacaaagctgcagagcacattccatgccagacgctctggccaggaagctgaggccgggcttgagaggagagcgctggccatgccaggagagaacccacgcacatgcacaccacaacacacaacacacctcacctcacaccacagcacacctcaccacaccacaccgcactgcaccatacctcaccacatctcaccacaccacagcacacctcaccacacaacacaccacaccccacaccgcactgcaccgcaccgcaccgcaccgtacctcgccacatctcaccacaccacaccacaccacacctcactgcccacacacggcgcaggctgcccgcctcctggagagcacacttcagctgaaacagtaaagcctgatgggtgcaaatggaacctggatgtgtgcacgtgtgtcccaggtagggacggcacaggagggtgcatggggcgtgggggagctgagcaagggtcgctcacttagaaatgtctttggaatggtgtttaactaatgctgctggcggacatcctaaaaccagatgcatcctcagaggacgagtctactaattattgcctttgttgttgtattacaaatctgcataaaatacctcatttcaaatcaaatcttacaaatttagaagagagatatgttttccgaaaacagtggaagccctttgttccttcccgggtttgtcctgagcctgcactgtcctcgcctgcagcctcagaggggcaggcatccccgcacagacttgactggcagggcggtcacgggacctgcgggctggctccgagtggcagcccatgccttctgcggggtatgggttgacacttgacaggttgaaaccagtgcctctatggacggctgctgtggccccttcagacaatgggcagtgcccaccccgcccactggcatctgcgtgtgagggctaggccgccctgccacacatcccgccccctcccggaggcagcttcaggacaggacaccaggctggctgctttttttagcctgcccctggcccaggcccagtccttggtgtcagggagcccccaggccgcaggtggagggtgataaaatatgttctctgacaggacccagccagccacataggtggaggttttccatgtccaaatgaggtcaagatgccgaaatcccagatctgacttcacacttcccttttctagaaccttttgtaaaagttggtggcagcagaggcagccccaggccgggctgcatctctctgtgtctgttgtgccttgcccggcgcctcacggatggcaaagctctcctcacccatgggactgtagtgcaattaaacccgcgtctaggtgatgcttttaaagttgtagcttcgtgctttgtacagttttctttctggttttaatttttagttgtgctttgagtcagtgcaataaactagactttttccaaacctggccgagtgtggtgcctgagctgtgagaagtgtcctcagccgacactcacgagggcagtgcaagggagaacctgccagcccagccccaccacagggagagtgcgtcagcagacctgtcctggcctggctggtgttgaaatacacaccggtttgcccaagtggctgttatgggggaatggccgctccagagctggctgtaccccatggtagcctctgaggaggacgctgtggggtgaggtccagggctgcctcctcatggagctgtgtgtgagcaggcgttggaggggttcgagcccctggttctgtatcttcagccagcaaacgaaaccatatcgcaaaccagagctgctggaaaccagcacacgcaaaagatgacgcccagcacagcagcaggacacaccatgtgccaggaaatgacctcagcaagaaacctcaggccgtgtgaagagcagcaaagctttccagaaggcataaaaggaaacttgaataaaggaagatatgttccacattcctggatggaggactacacacattatggaaagacctcattctttccaaaggaatttataggtgtagcttgatttcagttcaaatccccactgggattgttttgttggggcaggcagggaggaataatgttagtacccacaaatgcccatgactgtgcccaatgtgcttctcaccagagccctgcaaggggaagtctcattagccccttgagactcagagaggttaggtaacttgctcaaggtcacacagcactgggactggaagccagctctgtagaactgcagacctgtgctgtttgatgcctcctcactgtcccgtcactcctgggaagaagaaacgggtgagaactgctaagtgatgacaggtggagccccagcaggggccactctattgaatggcatggcccagaccctcggagggccaggcaacaggctagcaaggcccacagggagggagcagaatggagagggcatctcagatgcgcttaaggagcggcgggggcggggcatggggggtgtcacaactaatgtggccactgcttcattctctgggcaaaataatattaaatggattaaagaatctaaaaccagtgggaaaactgtctgatttctggatggcaaaggctttctaaactcaaaagtgataggacaagctacagaggaaaataagtacatagatttgatttctccaaaatacagaaatgctgctgggcacagtgatgtgcagttatagtcccagctacttgggaggccaaggcaggaggattacttgagcccaggagtttgaggctgcaatgaactatgatcacaccactgcactccagcctcggcgacagagcaagaccttgtttctcaaaaataaataaatagaaggaaataaatgtaaaaatgctgcaaattaaaaacctcaaagaagggaaataattgcaacaaatgggaattgatgttgaatatttaccttaaaaacctatacaacaataagaggagtgcgcccttcagcagcatgtatacaaaaattgcaacgatacagagattagcatggcccctgcacaaggatgactcgcaaattcataaagctttccataaatatatttattaaaaaccaataggaggagcacttcgagtcgagtgtaagggcccttcacaaaagcagaaggaacactggcccaaacccccagcaccccggaagcagaggtgagatgggagcagcttgggagccccccattggcgccgccctactggggaagccggtccgtacgtaggccttgcatctcgccacctccacttctgtcctcaagaacaagtcctaggtcaagggaaacagcacagcctgtttataattaggaaacacttaaaacagcctggcatttgggaacagccatgttaacgtgagcaaattcctctcatgaaatagcctgcagctattaagaagcacgtgtgtgcaggaagcggaggcgcaggacctcaccgcgccagcgtgaagttcccgggcatggtcatgaaagcgtggttctgtaagaaatcagagggagaaagggagagaagggggagggagacaacccaaacgttggagggtatttgttgtaaacttcaaacttttggcaggtttgaaatttttcataactccggggaggagcaagaggggtgaaaagaaacaagttctctacttgtgatcagcagctggtcatagtggttgcctggagtatatgcctttttgtatcctttgaatttccagccatgtaaatgtattatttattccaaaaataaagcagatttacattttaaaaattc

SEQ ID NO: 57162 - DNA, 8959 bp, Homo Sapiens; identical to SEQ ID NO: 29004

SEQ ID NO: 57163 - DNA, 4055 bp, Homo Sapiens
ccgacccgctaggccccgcgcggctcggatccggcggcgctgtttcggtcgggagtgggtgggagagaagccggggcaggggaggagccgccggagctgtcggagccgtgacacccagggcagctacactcagaagccacaaggaatgctagtggagcccctcatccctcccagcttctcttccaagctgccccgtggggcttgatccaggaagctacttcagaaagtagacaatcattccaagggtacaacaaggtttaccacaatgtgagggactcagccattgcaaattgtacagatgagggcccttggaagaaaatcctcgctgtgtccaggctgaggcggggggctaatgacagtgtgagctctagatggtgtgagaccaccccaaagccaagaaatggctacagccgtggaaccagaggaccaggatctttgggaagaagagggaattctgatggtgaaactggaagatgatttcacctgtcggccagagtctgtcttacagagggatgacccggtgctggaaacctcccaccagaacttccgacgcttccgctaccaggaggcagcaagccctagagaagctctcatcagactccgagaactttgtcaccagtggctgagaccagagaggcggacaaaggagcagatcctagagctgcttgtgctggaacaatttcttaccgtcctacctggagaactacagagctgggtgcggggccaacggccagaaagtggcgaggaggcagtgacgctggtggagggtttgcagaaacaacccaggagaccaaggcggtgggtgactgtccatgttcacggccaggaagtcctgtcagaggagacggtgcatttaggagtggagcctgagtcacctaatgagctgcaggatcctgtgcaaagctcgacccccgagcagtctcctgaggaaaccacacagagcccagatctgggggcaccggcagagcagcgtccacaccaggaagaggagctccagaccctgcaggagagcgaggtcccagtgcccgaggacccagaccttcctgcagagaggagctctggagactcagagatggttgctcttcttactgctctgtcacagggactggtaacgttcaaggatgtggccgtatgcttttcccaggaccagtggagtgatctggacccaacacagaaagagttctatggagaatatgtcttggaagaagactgtggaattgttgtctctctgtcatttccaatccccagacctgatgagatctcccaggttagagaggaagagccttgggtcccagatatccaagagcctcaggagactcaagagccagaaatcctgagttttacctacacaggagataggagtaaagatgaggaagagtgtctggagcaggaagatctgagtttggaggatatacacaggcctgttttgggagaaccagaaattcaccagactccagattgggaaatagtctttgaggacaatccaggtagacttaatgaaagaagatttggtactaatatttctcaagtgaatagttttgtgaaccttcgggaaactacacccgtccaccccctgttagggaggcatcatgactgttctgtgtgtggaaagagcttcacttgtaactcccaccttgttagacacctgaggactcacacaggagagaaaccctataaatgtatggaatgtggaaaaagttacacacgaagctcacatcttgccaggcaccaaaaggttcacaagatgaacgcgccttacaaatatcccctaaaccggaagaatttggaagagacctcccctgtgacacaggctgagagaactccatcagtggagaaaccctatagatgtgatgattgcggaaagcacttccgctggacttcagaccttgtcagacatcagaggacacatactggagaaaaacccttcttttgtactatttgtggcaaaagcttcagccagaaatctgtgttaacaacacaccaaagaatccacctgggaggcaaaccctacttgtgtggagagtgtggtgaggacttcagtgaacacaggcggtacctggcgcaccggaagacgcacgctgctgaggaactctacctctgcagcgagtgcgggcgctgcttcacccacagcgcagcgttcgccaagcacttgagaggacacgcctcagtgaggccctgccgatgcaacgaatgtgggaagagcttcagtcgcagggaccacctcgtcaggcatcagagaacacacactggggagaaaccattcacgtgccctacctgtggaaaaagcttcagcagaggatatcacttaattaggcatcagaggacccactcagaaaagacctcctagctaggtccccatgtgaggagatctgctttcagccctcacctaagggaggtgaggaagaggaaaagccctcttgtcagcctgggaagaccttttcgagggagtctccctgacctgctcagatctgacattacctcttcctgcaactaaacacgagcctgggcagaacctctcagccttcctctacgccttgaggggatgtttcatccaaagtacaacctgaattgaggcttctccttcactggagtgcacctgcctctacctcatgggtataaagtaggagaactaagagacttaagaggtcgtggttcctatatcgtccaaaaaataggctgttacatatcctaaagactgctcaacagcttcaagttgaaagtggccaaggacagccccttaggtttgggaagggacgagcctgaaggattctgtctttactggggtcaaatcttaaagcacacagctctggactcaagacaggaggtttgcgtcctgatggctttgccacacattcacaggataactgcatagatccctcgctgtctgattcacttcttaccatgcactttcctttgatgctgaggagaaatggaagtgggcgaaaaatctcaaggctgcttcatgtggaccttgtcaagctgctccctcccccagcgtcaaattgttatcaggtgccaaacactgctagaaaggagggcctagtcagaagcctctttccatacgagttttggttttgtttttaatatttttttctattaaaatactcatgcatttaaccttcccgttattcaaccagtctcttggttgcatccctagcacttctactacaagtgagatggtagtgtttgagtgcttattgagtaaagcataattcggtcataatgaaatcgttcacattccctcatatgcacaagcccaccaaccccttcacaccccccttcacaggggtcgtatgagtaaggggatttggaaactgtcaacttacaaaggcactataacaattacagaatcatgattgccatgggccactttatttacatgaagacaactggagaacgactaagaccaaattatggaaaataagaaaaagctgttgctggcaagaccatcaagactgttctgacaccctgtccccatcatccctgactgagtactctgacatcacggaaagtgttgaacctgggaccctgaggaattcaccaggagtaaatggctttcatgtatttgtgttgtttgctttttcttacgtgattttatgttcatagagctagaaagtagcatctcatgatggcccaacaatctctgttgccagttaaaggttccttggagatgaggctgaataattatgaacctcaccttctctgattgtgggagtggcaagaactggggagacgtcctccataagtggagcacagggtatggggttaaagcatgacagggagagtcttctgtgcctggtttcttctcctctatctcataatgcattatgggcccgaggaataggggagggttaataagactccaaccctaatggcccaacagggaaattctcattttggtcgatgatattctgatggactggtttggtcttaataccagtcaaccgttgtccttctggaaatatacatatatgaaataaataaaggtaacacttgcagccaagttccctggtttctgggacttcccatcttacccattccttttccagggcttc

SEQ ID NO: 57164 - DNA, 2920 bp, Homo Sapiens
gatttatggaaagcacctggtgcgtgttctgccctctgaggaccctgccctttcccaaaaggggtatcttaagaaggaaaatatggctgctctttgccggacagcagagtcccagtaggatttccattttccaaacctggtatcatctcctagttggaagaagtggtaagcccacgaacacaaatgcaggagggagaggtgccaagaagcagcggtacacagcaggcacagagacacgtggtcttcagcagagcctatggggttcagatgattcacataagaatagaagtttcagggctggacctggggaggcagcctgagcctgagccggctgtcctgagcctgagtactctagctgccttgtcgtcatcgcatctggctgccatccagcgccagcacacagtaatgagtggccgagcttcctctgggagggaggaaacagttaaaatcttgcagcagctgcaatcatctaggcgtggttctcttgtctgacttgggctgcacagatcctgggccaagggacagaagaaagacagcctaggagcagagcctcccagatggctgagttggatctaatggctccagggccactgcccagggccactgctcagcccccagcccctctcagcccagactctgggtcacccagcccagattctgggtcagccagcccagtggaagaagaggacgtgggctcctcggagaagcttggcagggagacggaggaacaggacagcgactctgcagagcagggggatcctgctggtgaggggaaagaggtcctgtgtgacttctgccttgatgacaccagaagagtgaaggcagtgaagtcctgtctaacctgcatggtgaattactgtgaagagcacttgcagccgcatcaggtgaacatcaaactgcaaagccacctgctgaccgagccagtgaaggaccacaactggcgatactgccctgcccaccacagcccactgtctgccttctgctgccctgatcagcagtgcatctgccaggactgttgccaggagcacagtggccacaccatagtctccctggatgcagcccgcagggacaaggaggctgaactccagtgcacccagttagacttggagcggaaactcaagttgaatgaaaatgccatctccaggctccaggctaaccaaaagtctgttctggtgtcggtgtcagaggtcaaagcggtggctgaaatgcagtttggggaactccttgctgctgtgaggaaggcccaggccaatgtgatgctcttcttagaggagaaggagcaagctgcgctgagccaggccaacggtatcaaggcccacctggagtacaggagtgccgagatggagaagagcaagcaggagctggagaggatggcggccatcagcaacactgtccagttcttggaggagtactgcaagtttaagaacactgaagacatcaccttccctagtgtttacgtagggctgaaggataaactctcgggcatccgcaaagttatcacggaatccactgtacacttaatccagttgctggagaactataagaaaaagctccaggagttttccaaggaagaggagtatgacatcagaactcaagtgtctgccgttgttcagcgcaaatattggacttccaaacctgagcccagcaccagggaacagttcctccaatatgcgtatgacatcacgtttgacccggacacagcacacaagtatctccggctgcaggaggagaaccgcaaggtcaccaacaccacgccctgggagcatccctacccggacctccccagcaggttcctgcactggcggcaggtgctgtcccagcagagtctgtacctgcacaggtactattttgaggtggagatcttcggggcaggcacctatgttggcctgacctgcaaaggcatcgaccggaaaggggaggagcgcaacagttgcatttccggaaacaacttctcctggagcctccaatggaacgggaaggagttcacggcctggtacagtgacatggagaccccactcaaagctggccctttccggaggctcggggtctatatcgacttcccgggagggatcctttccttctatggcgtagagtatgataccatgactctggttcacaagtttgcctgcaaattttcagaaccagtctatgctgccttctggctttccaagaaggaaaacgccatccggattgtagatctgggagaggaacccgagaagccagcaccgtccttggtggggactgctccctagactccaggagccatatcccagacctttgccagctacagtgatgggatttgcattttagggtgatttgggggcagaaataactgctgatggtagctggcttttgaaatcctatggggtctctgaatgaaaacattctccagctgctctcttttgctccatatggtgctgttctctatgtgtttgcagtaattcttttttttttttttgagacggagtctcgcactgttgcccaggctggagagcagtggcgcgatcttggctcactgcaagctccgcctcccgagttcaagcaattctcctgcctcagcctcccgagtagctgggattacaggtgcctgccaccacacccagctaatgttttgtatttttagtagagatggggtttcaccatgttggccaggcagatctcaaactcctgacctcgtgatgcacccacctcggcctcccaaagtgctgggattacatgcgtgagccactgcgccctgcctgtttgtagtaatttttaggcaccaaatctccctcatcttctagtgccattctcctctctgttcaggtaaatgtcacactgtgcccagaatggatgaccaggaaccttaaagagtggctgaaaagattgcagagttatcataataaattgctaacttgcgtaaaaaaaaaaaaaaaaaaaa

SEQ ID NO: 57165 - DNA, 6750 bp, Homo Sapiens; identical to SEQ ID NO: 29890

SEQ ID NO: 57166 - DNA, 3594 bp, Homo Sapiens
aggactttggcgagggggcagccattttggggggtgctgatggatacctgcggggtcggctatgttgccctgggggaggccggccccgtggggaacatgactgtggtagactctcctggacaagaggtgctaaatcagcttgatgtcaagacctcttcagaaatgaccagtgcagaggcttccgtagagatgtcattacctacccctttgcctggatttgaggattctcctgatcagaggaggctccctccagagcaggaaagcctctccagactggaacagccagatctttcttcagagatgtcaaaggtctcaaagcctagggcctcaaagcctggccggaagagaggtggtaggacacgaaaaggccccaaaaggccccaacagcctaatcctccatcagccccactggttcctggtctcttagatcaatccaaccctctgtccacccccatgcctaagaaacgaggtcgaaagtccaaggcagagctgctgctgctgaagttgtcaaaagacctagatcggccagaatctcaatctccaaagaggccccctgaggactttgagaccccttctggggaacgaccccgccgaagggctgcccaagtggcacttctgtatcttcaggaactggctgaagagctctcaacagccctgcctgcccctgtgtcctgtcctgagggccccaaggtgagcagccccaccaaaccgaagaagatccggcagccagcagcctgtccaggtggagaagaggtggatggtgctccacgggatgaagacttttttctccaggttgaggctgaagatgtggaagaaagtgagggcccaagtgagagctcatctgaacctgagcctgtagtgccccgaagcaccccacgaggatctacttcagggaaacagaaaccacactgccgaggaatggctcccaatggcttaccaaatcatatcatggctcctgtttggaagtgcctccatctcaccaaggacttccgagagcagaaacattcatactgggagtttgctgagtggattcctttagcctggaagtggcacttgttatctgagcttgaggccgctccctacctgccccaggaggagaagtctccattgttttctgtacaacgtgaagggctacctgaagatggcaccctctaccgaataaacagatttagctcgatcacagcacatccagagcgctgggatgtgtccttcttcacggggggaccgctctgggctctggactggtgcccagtgccagagggggcaggagcctcgcaatatgtggctcttttctccagccctgacatgaatgagacacacccactgagccagcttcattcgggtcctgggctgctccagctctggggccttgggaccttgcagcaagaaagctgtcctggcaacagggcccactttgtctatgggattgcttgtgacaacggctgcatctgggacctcaagttctgccccagtggagcatgggaacttccaggcacccctcggaaggctcctctcctgccccggttgggtctcttggctctggcctgctcagacgggaaagtactgctattcagtctaccccatccggaggccctgctggctcagcaacccccagatgcagtgaagcctgccatatataaggtacaatgtgtggcaactctgcaggtggggtctatgcaagctacagacccctctgagtgtggtcagtgccttagcctggcctggatgcctaccaggccccaccaacacctagctgctggatattataatggcatggtggttttctggaaccttcccactaactcacccctgcagcggatacggctctctgatggctccttaaagctctaccccttccagtgtttcctagcccatgaccaggctgtgcgtacccttcaatggtgcaaagctaacagccatttccttgtctctgcggggagtgaccggaaaatcaaattctgggaccttcgacgtccttacgaacccataaactctatcaagcgcttcttgagtacagaactggcctggctgcttccctacaatggtgtcactgtggctcaggacaactgctatgcctcttatggactctgtgggattcattatattgacgctggttaccttggtttcaaggcctacttcactgctcctcgaaaaggcaccgtttggagtctttcaggatccgactggcttgggacaatagctgcaggagatatatccggggagctcattgctgctatattaccagatatggcactgaatccaataaatgtcaagcgacctgtagagcgaagatttcctatatataaagcagatctgataccgtatcaggacagtcctgaaggtccagaccattcttctgcttcatctggggtccccaaccctcccaaggctcgaacttacactgaaactgtcaaccatcactacttgctctttcaagacacagatttgggttcattccatgatctgctccgtagagaaccaatgctgcgcatgcaggagggagaggggcattctcaactctgcctggacaggctgcagctggaggctattcataaggtacgtttcagcccaaacctggactcctatggatggctggtatctggggggcagtcagggctggttcgaatccattttgtccgtggactcgcctccccactgggccaccgtatgcagcttgaaagccgagcccacttcaatgctatgttccaaccatcctcccccactagacggcctggcttctctccaaccagccatcgccttctgcccactccctagccttggcccacaccagatccttggagtgaagtcggtcaagaacaaatggcccctatgcacagagccataggaactgggggccttccctggacagtgatcatgccaggcctggacctttaggcctgcctccccaggactccttagatcccactctttctacagacttctgtgatcacagccccctgcgggcaggggggctctccctccaccaactctcaaggctcctcagcctaagactatggctcatgagaaacactcaggcctgacctaggcttgggagtcaaactgctcatattgagcatattgttaagtgggtaaagccaagtaaaggtactgggtgtttttgtgaccacttgtgaatgggtgtatggagaactgaaaagggtatctgcatgaaggctcctgtctgactattccaggatccaatattactgccttctgaaacttcctctttagggtaaccatcatgtatgcccacgagggtgatagtaattcgtgagactgaagttgcttagagtacttctttgaccaaggaataccacagacaccctaccgatagaacagtggctcagatcttacttgctcctgcttacgaagtattcccaatcactggtcatctgaccctacttgaacactcctgaacagtcatgttttttaaaatcttcctttatatcaagtcagagagtatacttctataaatttcactcatggatgttaggaaatctagtcatcttccctgtgattgccctgttaagtatttaaccatagctatcatgtgtttcccaaatcttctctagattaaatatcttcagttacttc

SEQ ID NO: 57167 - DNA, 5250 bp, Homo Sapiens
atggcggccgcagtctctagtgtggtgagacgagtggaagagctcggggatctggctcaggcccacatacagcaacttagcgaagctgccggtgaagatgatcactttttaattcgggcctctgcagcattagaaaaattgaaactcctgtgtggagaagagaaagaatgttcaaatccatcaaatcttctagaactttacacacaggctattttggacatgacatattttgaggagaacaagctagtagatgaagattttcctgaagactcttcttcacagaaagtaaaagagctgattagttttctttcagaaccagaaattttagtaaaggaaaataatatgcatccaaaacactgcaatttgcttggggatgagctactggaatgtctctcttggagacgaggagccctgctgtatatgtattgtcattctcttaccaaaagaagagagtggctcttaagaaaatccagtttgcttaaaaagtaccttcttgatggaatcagttacttgctacagatgctaaattatcgatgtcctatccagttaaatgaaggagtttctttccaagatctagacacagctaaattactgagtgcaggaatatttagtgacattcatctgctggctatgatgtacagtggagaaatgtgttactggggatcgaagtattgtgctgatcagcaaccagaaaatcatgaagtggatactagtgtgtctggagcgggctgcactacatacaaggaacccttggatttccgagaagtaggagaaaaaatcttgaaaaagtatgtatctgtgtgtgaaggacccctgaaagaacaagaatggaatacaacgaatgcaaaacaaattttaaacttctttcatcatcgctgtaactagtaagttcatctagtccttttcaaatagaaaaacaacaaaacccatgaaatggaaaagagagttccaaaaaagaagacctgttgatactgaatatgagaacattacactgcataaagatatccagcttgggtaccctactaaaacaacatcaccatctttttcattatatattagtaaacctatgaagggatgattctttaatttctaaagtgttgttcaaactcaccttaaaatacagatgttatgtcactaataatgagtagtaacccaatttagctttacaaagattttttctattactttttttttttattgtggtatatgtaacacaagtttaccatttttatcatctttagattatttttaaatctcactaccttgaagtttgccatgcttcagaaattaaagtcaagttacttcactgctttgaatacatactatggatataaatgtaggcaaaatgaaagattatgactaatattcagattccattttcaataaggtaaataatgaaagatctcacaaaggaatcattgtgtttaattattttgccatgtattactaattgtatttaaaatttctacttcccttaggcattttataaaaatttaaaaattatttttctattttgtttaaaagacaatgcatggcttttcaagtgagtaatgaagataaaaaccaagctaggttagtctaccattagttcatatgtttttgtagcacatcttttcataacatactgaaattttaatgttttttgcctttaataataggggtgagtgttaaaggccagagagcctaacttgatatcttgctcatggtctttctgtctacctcaactcctgttgtcatctttggatgatctttctgataccttgctgataccttggacttctgcccagtgactttattacattccagcagcttactcccgtggccgcactttgaatgtcaccaccttgagtttctctttctggtaaaatttcagtaactgataactgccctcttttcagttttttcacttccttattttattgacttttctctcctttatgctcattccacattcttcagttccttcttacccccttttcttgactgctccccttcctcctaaactgtcagcccctttcaggctttcttccctatccaccctcagctttatgggatactatatgaactaatctcaccagttattcttctttccctggtcttttagtctagtcctttggcaagccctcaacctcagattaatcctatttattatctaccttttcggggatgctgagttctttgtgatgggtagtccttcaaagtagaatcactacaagtgtctcacttcagccttagaaaagccctcaatgtaaaccttatgtttgttactagggtggcctctctcccatttcccgctgtggctgagccaaacttcattactttccttaggccctctgcccctcccctagcatatggctctttctcctattgaacagaaaattgagactatgaagaggtcaacttgtatttaccaactttactcattttcccattttagaggaaaagaggttgcctgcttcctatcaaaggcgactctgtgctacatgttggtttcatcttcgctgtctctctcatttccccacaaagtgttgtctcactttctgcctaccttttaggtattgatcttcactatatttttttctctctctctcttttttttttttactttacatattttatacaatgtcattcataactatggcttcttttaccaccagtaataacagactgagtctcaaacctgtaacttgtatcctgacttatctcttgctttctaaaccttgtttctaactgtctatcaaatatcttcattagacatcccacagtaattttaagctcagtgtttccaaacgtcaagtcctcatctgttatataaaatcctttctgctttgtaagttttctctttttgggattttccgcagatcagggcaacacagaatgactaccttcccagccatgtctctgcagtcatcctgtgtaatcatgttctagtccagtgttgctcaaacagttaaaatccaggctgcttttggtaaacatacaaattctgatatagagcctctgtggcaaagggaatttctcagttcctgccccagcccccttgtttatcattacacagctaagatttttatttaacttagcattttagcaagttttcttatgaaaatacctttgtgctttctaagtataaagatttaaattatttttaatacggtttttagaaccacagactatccctctttttagagcatcctgatcaattgcaagtacttccacttcttccctaaatgcgctttgtgtgttttccacctcagtagccttgcacacatcattacttctgcatccttctttgtgaccaagtgaatacctacctacctcttaggactcagcttcagtgattctgttttcataggctttttaaagcccttttcagtcaaattagatgctcctttgttctggtcctttactcttcccctcccatgttgtcgcactgatcacactgctttgtaattattttctttattgttggtaaactccatattttaaaaatttacctgtatacatagtgcttaatgcatggtaggcccttagtaatgtttttgaattaatgaggcatgattctaaatgccaaactttgcacaaaaagttgttgctattggattccaaactgctatgccctctataccagtggctgacaaggcatatagggatatatgccatcctgagaggagtaaagtgtttagattctgaacctgagaaaagagaactttctcttaagaagttggaaacttcattttaccttcgtgaccctggtagaccacttggtctcactggttggtacaattatgagggtagtactgggtgctttttatacaactttccatcccccacacagttggagaataatttgtagaccatggcagttaaaatgctttttactctggtgtattatagaataatgaacacatttttatatatgttaaagcctgctaaatcattcacttagaatgaagtaacctcaaggtaccaaataccccacataaggaaagtactacactaaattcactcaactattgtatgcctaccatatgccagattttatcctagaccctgaggatatagctttttaaaaccccctcctgtttcagagcttatattctagtggaggaagttagacaagcattttaagtaataaatgtatagagagtgtcaagtgatgagtaccatgaagaagaataaatgagggtaaggggctagtgtgatagggagaggggtgggatgccatcatatttaggggtggttgggaactgtctactgctttagcatttgtgtcttcaaatttctctcctttggttatataccttgcgtattccgcacattgataaagtttctttcttacagaagttctgatattgaattaaggaatgggtcactacttaagactttatcatttcagctacacataaaaggtttctctcccctatggattttgctaatggttgagtgatacctaaaggccttgttgcattttttacacttggggtttctcttcggtttgaattctctcatggttaccaaaactctgttaaaggacttttcacagtcgttaaatgtgtatggctctttcccaatatgaatttttttgatgttaactaggcttttagacttagttaaagacctgtgtgctctgctgcatttatagggttttgggctgctgagaataattgatgctgattaaggtgcaaatcatgactaaagacttttctttcttcttttgcatatagtagagtgaggtgagggtcgtggctaaaaccccacaataactttacattcctagctttacagtcttgctgtgaattctctggtgttcattaaagtgtgagctgtgttaaaaggcattcttagattcattttaaccacatttttaaaaactcacagttggttaacatgatggtttcagattgcttgcctcttttctctttctaccttacagggctccttttctagcttaaataagggtactccatctgccacagaatccaggattctatagttttttagtttcacttccctatgttctttttttttttttaatttttaacaatgagatgataccatgttacagcggtattacattaagatacatttaatatagccacaattaaagtatgtattatgtatttatgctggtgttctttcatgttatttcttctagtgaaaatttccaagtaaactgttattgagcatatacatttttaaaaaaataaaaccatacacccctaaaaaaaaaaaaaaaaaaaaaaaaaaaaa

SEQ ID NO: 57168 - DNA, 6234 bp, Homo Sapiens
gagaagcccacgccactctaccccagagctctcgatggtgcttctccggcttcagggctggagtgggggtggagggcgggaaaaaccacagagacaaaacatagagtaccccggcagccggcaagaggaagagagagtggcttccacatccccaatatcctagaggcggctgagccggaggcggtcgcacaaagcgggccccgggggccgttccagccgcggccgaccatagagatgcggctcccgccggctctgggtctggagccttccaggttacaaaccgcctttccagttcgctggctcttatgatccagctcctgcccgacgatgtggacactgtcatcacctccattttacagataggaaagctgaggcccagagaagcgaagcgactgtgtctgtccaagaccacgcgccctcctgcccggaagataagcgtatttcttctctggtgcccacctgtctcctacctcaccctgccctcccgcaggtgaaggttcttaatcttgacggctcagcgtcctccttggctccccccggaggccatgtatggtcaagcttgaagattccccagaacagcgataatattcacatttaagaagccaaaacacacaagtcggtggtgatgacagacccccttttggactcacagccagccagtagcaccggggagatggatggactgtgccctgagctattgctgatccccccgcctctctctaaccgtggaatcctggggcctgtccagagcccctgtccttcccgggaccctgcacctatacctactgagccaggctgcctgctggtagaggccacagcaactgaagagggaccagggaacatggagatcattgtggagacagtagctggaaccctgaccccaggtgctcctggagagaccccagccactgcagcttcataggctccaacgtcaaactcttccggcagcatcagcggagccatggtgctgggacacagggagaactttctgccgttcagggccttccatcccaggagctgctgccagctcccaaactgcctccaggagagagagaaccttcacaggaagcaggtacacccttgcctgggcaggagacagctgaagaggagaatgtagagaaagaagagaagagtgacacccagaaggactcccaaaaggctgtggataaaggccaaggggctcagcggctggaaggggatgtggtctctggcaccgagtccctcttcaagacccatatgtgtccagagtgtaagcgctgctttaagaagcggactcatctggtggagcacctgcatctccacttcccagaccccagcctccagtgccctaactgccagaagttcttcaccagtaagagcaagctcaagacccatctgctgcgggagctgggtgaaaaggcccaccactgcccactgtgccactacagtgcggtggagaggaatgcactcaaccgccacatggccagcatgcatgaagatatttccaacttctactcagacacctatgcctgtcctgtctgccgtgaggaattccgcctcagccaggccctaaaggagcacctcaagagccacacggcagcagccgcagcagagccattaccccttcgctgctttcaggagggctgcagctatgcagcacccgaccgcaaggccttcattaagcacctgaaggagacccatggggtgcgggctgtggagtgccgccatcactcatgtcccatgctctttgccacagccgaagccatggaggcccaccacaagagtcactacgccttccactgcccccactgtgattttgcttgttccaataagcacctattccgtaaacacaagaagcagggccaccctggcagtgaagagctgcgctgcaccttctgcccctttgccaccttcaacccagtggcttaccaggatcatgtaggcaagatgcatgctcatgaaaagatccaccagtgtcctgagtgcaactttgccactgcccacaagagggtgctcatccgacacatgcttctacatacgggtgagaagccccacaagtgtgagctgtgtgacttcacatgccgagacgtgagctacctatccaagcacatgctgacccactccaacaccaaggattacatgtgcactgaatgtggctatgtcaccaagtggaagcactacctccgtgtgcacatgcgaaaacatgcaggggacctcaggtatcagtgcaaccagtgctcctatcgctgtcaccgggctgatcagctgagcagccacaagctgcggcatcagggcaagtctctgatgtgtgaggtgtgtgccttcgcctgcaagcggaagtatgagctgcagaagcacatggcttcccagcaccaccctggcacaccggccccactctacccttgccactactgcagttaccagagccgccacaagcaggctgtgctgagccatgagaactgcaagcatacccgcctccgtgagttccactgtgccctctgtgactaccgcaccttcagcaacaccacactcttgttccataaacgcaaggcccatggctatgtacctggagaccaggcctggcagctccgctatgcaagccaggagccagaaggggccatgcagggcccaacacccccaccagattcagagccctcaaaccagctgtcagcccgacctgaggggccaggtcacgaacctgggactgtggtggaccccagcttggaccaggccctgccagagatgagtgaggaggtcaacactggaagacaggagggcagtgaggctccccatgggggtgacctgggtggcagtcccagcccagcagaggtggaggagggcagctgcacactacacctagaggccctgggagtagagctggagtctgtgactgagccaccccttgaggaggtcactgaaacagcccctatggagttcaggcccctgggactggaagggccagatggactggaaggaccagagctatctagctttgaaggtattgggacttctgacttgagtgctgaagaaaatccccttctggaaaagccagtgtctgagccctccacaaatcctccatccttagaggaggctcctaacaactgggtaggaaccttcaagacaactccacctgctgagacagcacccttgcccccattacctgagtcagagtcattactcaaggccctaaggagacaggacaaagaacaagcagaggcattggtgctagaggggcgggtgcagatggtagtgatccagggagaggggcgagccttccgctgcccacactgcccttttatcactcgccgggagaaggccctgaatctgcactccaggactgggtgccaaggccgccgagagcccctgctgtgccccgagtgtggggctagcttcaagcaacaacgcggcctcagcacccacctgctgaagaagtgccctgttctactcagaaagaacaagggcttgcccagaccagattcacccatccctctgcaacctgtgctcccaggtacccaggcctcagaggacacagaaagtgggaagcccccacctgcatcacaagaagcagagctactgcttccaaaagatgctcctttggagcttcccagggagccagaagaaacagaagagcctcttgccacagtctctggttccccagtccctcctgcaggaaactccttgcccacagaggcccctaagaagcactgctttgacccagtccctcctgcaggaaactcctcacccacggaggcccctaagaagcaccaccttgacccagtccctcctgcaggaaactcctcacccacagaggccctgaagaagcaccgctttgagcagggcaagtttcactgcaactcctgcccattcctttgttcccggctctcctctattacctctcacgtggctgaaggctgcagggggggacgtggcgggggaggaaaacgagggaccccccagacccagcctgatgtgtccccgttgagcaatggggactctgctcccccgaagaatgggagtacagagtccagctctggtgatggggatacagttctggttcaaaagcagaagggggctcgcttctcctgccctacatgtccctttagctgccagcaggaacgggctctgaggactcaccagatccggggctgccccctcgaggagtctggagagctgcactgcagcctctgcccattcactgctcctgctgccactgccttaaggctccaccagaagcggaggcaccccactgcagccccagcccgtgggccccggccccatctacagtgtggggactgtggcttcacctgtaaacagagccgttgcatgcagcagcaccggcggctcaagcacgagggggtgaagccccatcagtgccccttctgtgacttttcgaccaccagacggtaccggttagaggctcaccagtcccgacacacaggcattggccgcatcccctgcagctcttgcccccagacgtttggtaccaactcgaaactgcgcttgcaccggttaagggtacatgacaaaacacctacccacttctgtccactttgtgactatagtggctaccttcgccatgacatcactcgtcatgtcaacagctgccaccaaggcaccccagcctttgcctgctcccagtgtgaagcccagttcagctcagagacagcacttaagcagcatgctctgcgccgacaccccgagcctgcacagcctgcccctggctctcctgcagagaccactgagggccccctgcactgttcccgctgtgggttgctgtgccccagccctgccagcttacgaggacacacccgtaaacagcacccacggcttgagtgtggggcctgccaggaggccttccctagccgactggctctggatgagcaccggaggcagcagcatttcagccaccgctgtcagctctgtgactttgctgcccgggagcgggtgggcctggtaaagcactacctggaacagcatgaggagacttcagcagccgtggcagcctcagatggggatggggatgctggccagcccccgctacactgccccttttgtgacttcacatgccgccatcagctggtactagatcaccatgtgaaagggcatgggggcactcgtctctacaagtgcaccgattgtgcttacagcaccaagaaccgacagaagatcacctggcacagccgcatccacactggggaaaagccttaccactgtcacctctgcccctatgcctgtgctgatccctctcgtctcaagtaccacatgcggatccacaaggaggaacggaagtacctgtgccctgagtgtggctacaagtgcaagtgggtcaaccagctgaaataccacatgaccaagcatacaggactgaagccataccagtgtcccgagtgtgagtactgcaccaaccgggctgatgcactgcgtgtgcaccaggagacccggcatcgagaagcacgggctttcatgtgtgagcagtgtggcaaggccttcaagacgcgcttcctgctgcgcacccaccttcgcaagcacagtgaggccaaaccctatgtgtgcaatgtgtgccaccgtgctttccgctgggctgctggcctgcgccatcatgccctcacccacaccgaccgccaccccttcttttgccgcctctgcaactacaaggccaagcaaaagttccaggtggtcaagcacgtacgcaggcaccaccctgaccaagccgacccaaaccagggtgtgggcaaagaccccaccacccccacagtgcacctgcatgatgtgcagctggaggatcccagccctcctgctcctgccgctccccacactggacctgagggctgaaagcctgccccacctcctgtataggaagagggtatggtctgagatgtgcagactgggaccagcgctagcctgaggagctcagagcctaaggaaagactggcttttggggtacaagggtgactagaaccttcctgggactctggctatagtactttgaaattatcacccatataaaagagggacatggactataacgttgatttcttattgctgtacattgcgtttttaacctgcaagttctcagtttcttcaccatcactccatcaaagtccctggctataagatctggattttacccactccatcttctctttccttcttactgtgtcaattcctattttctttcagaatcttctaaaaacagttgtatctaaccgcatgtgctgttgtgcctaatgctctataaagcatgttaaacagaaa

SEQ ID NO: 57169 - DNA, 6470 bp, Homo Sapiens
tcgtttaccttcgctagtcgccctgcagccccgccctgtccggaggccccgccctccatgaatcagctgatcccgcggacccactgggttgccaagctcgcgccggatgcggagcgcggtgctgccggtggagcttcaggtcttgatagactttctgtaaagaaggaatgatttggtgatggagtgttcccactgaccgatggactcaaagaagagaagctcaacagaggcagaaggatccaaggaaagaggcctggtccatatctggcaggcaggatcctttcccataacaccagagagattgccaggctggggaggaaagactgttttgcaggcagccctcggagtgaaacatggagttcttctgactgaagatggtgaggtctacagctttgggactcttccctggagaagtggaccagtggagatttgtccaagtagccccattctagaaaatgccctggttgggcaatatgttattactgtggcaacaggaagcttccatagtggagcagtgacagacaatggtgtcgcgtacatgtggggagagaattctgctggccagtgtgcagtagccaaccagcagtatgtgccggaaccaaatcctgtcagcattgctgattctgaggccagccctttgttagcagtcaggattttacagttggcgtgtggcgaggagcacactctggcattgtcaataagcagagagatttgggcatggggtaccggttgtcagttgggtctcattaccactgccttcccagtgacaaagccgcaaaaggtagaacatcttgctgggcgagtggtgcttcaagttgcctgtggtgctttccacagcttagcccttgtacaatgcctcccttcccaggatctgaagccagtcccagaacgatgcaaccagtgcagccagctcttgattactatgactgacaaagaagaccatgtgattatatcagacagtcattgttgcccattaggtgtgacactgacagaatctcaggcagaaaaccatgccagcactgctctcagcccctccactgaaacccttgacaggcaggaagaagtatttgagaacactcttgtagcaaatgatcagtctgttgctactgaactgaatgcagtaagtgctcagatcacaagcagcgatgccatgtcctctcaacaaaatgtcatgggaacaactgaaatttcctctgccagaaacataccatcataccctgacacccaagcagtcaatgaatacctacggaaactgtcagatcattcagtaagagaggactcagagcatggtgaaaagccagtgccatctcagcctcttttagaagaagcaattcctaatctccacagcccgcctaccacaagcacctcagccctaaacagcctggtggtctcttgtgcatctgctgttggtgtgagagtggctgctacttatgaagctggtgccttgtcactgaagaaagttatgaacttttatagtacaaccccttgtgaaactggagctcaggcaggcagtagtgccattggccccgaaggtttgaaagatagcagggaagaacaggttaaacaggaatcaatgcaaggaaagaaaagttcaagtcttgtggatatcagagaagaagaaacagagggaggcagtcgaagactctccctccctggattgttgtcacaagtttcccccaggctcttaagaaaggctgcacgggtgaaaacgaggacagtggttctgacccccacatacagtggagaagcagatgcgctcctgccttctctgagaacagaagtgtggacctgggggaaagggaaggaagggcagctggggcacggcgatgttctgcctaggcttcaaccgttgtgtgtaaaatgtctggatggcaaagaagtaatccatctggaggcaggtggttaccattctcttgcacttactgcgaaatcccaggtttactcatggggtagcaatacctttggtcaacttgggcattccgattttccaacaacagttcctcgtcttgcaaagataagcagtgaaaatggagtctggagcatagctgcaggcagggattattccctgtttttagtggatacagaagacttccagcctgggttatattacagtggccgacaggaccctacagaaggtgacaaccttccagagaatcacagtggttctaagactccagtacttctctcctgtagtaagcttggatatataagcagagtgacagcaggaaaagatagctatttagccttggtggataaaaacattatggggtatattgccagtctccacgagttagctactacagaaagacgattctattcaaaactaagtgatatcaaatctcagattctcaggcctcttctcagtttagaaaatttgggcactacaactacagtccagctgttgcaggaggtggctagccgattcagcaagctgtgttacctcattggtcagcatggagcctcattgagcagcttccttcatggggtaaaggaagccaggagtttggtcatcctgaagcattcaagtctcttcttggatagttatacagagtattgcacatctattacaaatttcctggttatgggaggattccagcttcttgctaagcctgccattgatttcctaaataaaaaccaagagctgttgcaagatttgtcagaagtgaatgacgaaaacactcagttgatggaaatactgaatactttgtttttcttgccaatcagacgacttcataattacgcaaaagttttgctaaagcttgctacttgttttgaagtggcatctccagaatatcagaaactgcaggattccagttcttgttatgagtgtcttgctctccatctcggcaggaaaaggaaggaagcagaatacacactgggcttctggaagaccttccccggaaaaatgacggattccttgaggaagccagagcgtcgactgctgtgtgagagtagtaaccgagccctgtctctgcagcatgctgggaggttttccgtgaattggttcattctctttaatgatgccctggtccatgcccagttctccacgcaccatgttttccctctggccacgctgtgggcagagccactgtctgaagaagctggtggtgtgaatggcttaaagataactacacctgaggagcagttcactctcatttcatctacaccccaggaaaagacaaagtggctacgagctataagccaagccgtagatcaggctttgagagggatgtctgatctccccccttatggaagtggtagcagtgttcagagacaggaaccacccatttcacgcagtgccaaatatactttctacaaggatcctcgcctaaaggatgccacctatgatggacgctggctttcagggaagcctcatggcagaggggttttgaagtggcctgatggaaagatgtattctggcatgttcaggaatggcttggaagatgggtatggagaatacagaatcccaaacaaggcaatgaacaaagaagaccattatgtgggccattggaaagaaggaaaaatgtgcggtcaaggagtctacagctatgcttctggtgaagtatttgagggctgttttcaagataatatgcgtcatggtcatggtcttctacgaagtgggaaattgacgtcctcttctcctagtatgttcattggccagtgggtaatggataagaaagcaggatatggtgtctttgatgatatcactaggggggaaaagtatatgggaatgtggcaagatgatgtgtgtcaagggaatggtgtggtggttacccagtttggattatactacgagggcaactttcaccttaataaaatgatgggaaatggggttttgctttccgaagatgatactatctatgaaggagaattttcagatgactggactcttagtggaaagggaacactgactatgccaaatggagactacattgaaggttattttagtggagaatggggatctgggataaaaatcactggaacctacttcaaacctagtctatatgagagtgataaagacagacctaaagttttcaggaagctaggaaacctggcagtgccagctgatgagaagtggaaagcggtgtttgacgaatgttggcgccaactgggctgtgagggcccaggccaaggggaagtttggaaagcatgggacaatattgctgtggccttgaccaccagtcggcgccagcacagagacagtccagaaatactgagtcgttcacagactcagacactagagagtttggaattcattccacagcatgttggtgccttctctgtggagaaatatgatgacatcaggaaatatttaataaaggcctgtgacactcctctgcaccccctgggcaggcttgtggagacactggttgcagtgtatagaatgacatacgtgggcgtaggagccaaccgcaggttattgcaggaggctgtaaaggagattaagtcctatcttaagcgaattttccagctggtgaggttcttatttcctgagctgcctgaagaaggcagcacaattcctctctctgctcctctgccaaccgaaaggaagtctttttgcactgggaagtcagattcccgatctgaatcaccagagccaggttatgtagtaacgagttctggattattgcttcctgtgctgctacctcggctctacccaccgctgtttatgctttatgctttggataatgatcgcgaggaagacatttactgggaatgtgtccttcgactaaataagcagccagatattgctctcctgggctttcttggggtgcagaggaaattttggccagcaaccttgtcaatccttggagagagtaaaaaggttttgccaaccacgaaagatgcttgttttgcctcagcagtagaatgtctgcagcagatcagcacaacatttaccccatcagacaaacttaaggtcatccagcagacttttgaggagatctctcagagtgtcctggcgtcactccacgaagacttcttgtggtccatggatgacttgtttcctgttttcttatatgtggtgctacgggccaggattaggaatttaggctctgaggtacacctcattgaggatctaatggacccctatcttcagcatggggaacagggtataatgttcaccaccttgaaggcatgttactaccagattcagcgtgagaagcttaactaggctgcataacagcttgaaaactggattatctactacagagtgttataacaccatctggagtcttcctgtagtggcaaaaaagaacagtgttgaaattggaaaggactttgtgttatttaggttgttagaatgagccttaccaataataagagccctgagcccagaaaaaaggactgtatagtttaaagggaggattgaaagggaggtaaaaaatcagattagaccagttcttggcctatgataagttccaaaaataccatttatctactatttgaaaaaagaagaggatatcccttcctacagtaaagggtatgtcagctacatgaagttgtaagaaaagcttccagtagagcttcttatattaaagaagttgatggatatttttgaatttctggtttgcctgaatccacctgcagttaccccgatccgtttgcaagaaccagatcgtacttgaaactatagtggccacactctgccttcctgagtcccttccagtcatgtgtgcatcatgtctctttgccaagggaggggagaaaggaacttttaaactgcagttttaactttttctaagctgtttcttgatgggagaggttctgtgcaaaactaccacattctgtccccaaaatgtggaatgcatccaaataggagtcttctgcctcttaacttaaaagaacataggaattttgtttttggtttctttatcatgctacagagagtgaatacactggaattcagacaccgactctgagctgctaggaacctcatttgtccatgtgcaaacgctgtattccaaggcctgtgaatggcagcctgaggaagttttgcatgcaggctgtgttttcgagcaggactaacaactgggaaataagcaaaaaactgcatcgatccccagcctggtgttgttcttccctatacttcacactgaactcaggatgggaagaaaaaggaaacaagctttggctttttccatctcaaaagtattgtggcacctcaacatttcagtgttttgctttttaaaaaatgccctattgtaagttgttggtttatactgtataagtaacactagtagctgttttgaataacataggtgctcttcctcatctcatctcctacaccgtggtgagcatacagagtgtcctgatttgtgttaagtgactgagaagatgttaattacttttgaaaaaggatcatggtttttgctctactttataatcaagacaagtgtttattaaaatactgttttggaatgttggctgtaatgtaacagcaattttcataataaaaggcattcatcttt

SEQ ID NO: 57170 - DNA, 2324 bp, Homo Sapiens; identical to SEQ ID NO: 29101

SEQ ID NO: 57171 - DNA, 5730 bp, Homo Sapiens; identical to SEQ ID NO: 30433

SEQ ID NO: 57172 - DNA, 4346 bp, Homo Sapiens
gaagtagcgggcagttggccggaagtggggctgtgaggctcggagtcgccggaggagccagtatctgtgtcgccgccgcccgcggcgtccccggtttggtgttgcggcgcccaccttcgggaggatcaggctgcttctgatgcttggaagatatcctctcagccacaaagatggtaataaatctttgcctcccacagttcagaccaagaattcactgcaacaagatatcagctgatggttacgaagtagaaaatctcatctctgaagatctcacaaagagaagtcatggtttcaggacagagtatttcattaagccaccagtctatgtgacagtttcatttccctttaatgtggaaatctgtaggatcaacatagacctcacagctgggggaggtcagaacgtcactggcctggaaatgtacacatctgcctcatctagcagagtgtcttggaatacgccccagtgccggaccctgggcccagctgagccatctgtcccagacaaggaggcgttcaccttggtaggcaaagtcttactgaaaaaccagagccaagtggtgtttagccacaggggcttcaaggccaggcccccttttggcgcgatggaagccacactcccctcccctgctgttgtggcccaggagctctggaataaaggggctctttcccttagccacgtggcccacttaaggatctgtatcacccatgtgacaggcggcggtatcccttgtatcaagcggttggaagtgtggggtcagccggccaagacctgctcccaggaagtgatagacagcatcctgctggtcacctcagagaacctgcctcaggatgtggctctgcaggctccagccttgcccatggaaagtgactgtgaccctggggaccagcctgagagccagcaggctccctccagcctgcagaagctggccgagatcattcaggatgtgcctgaggagttcctggatcccatcaccctggagatcatgccttgtcccatgctgctgccctcaggcaaggtcatcgaccagagcacactggagaagtgtaaccgcagtgaagccacatggggccgagtgcccagtgaccctttcacgggggtagcttttactccgcactctcagcccctgcctcacccctccctcaaggcccggattgaccatttcctgctccagcactccatccctggctgccacctgcttgggagagcacagacggcattggcagtgatcccttcttccattgttctgccctctcagaaaaggaagatagagcaggctgaacatgtcccagacagtaactttggtgtaaatgcttcctgtttttctgccacaagccctttggtcttacccactacctcagagcacactgctaagaaaatgaaagccaccaatgagcccagcctgacacatatggactgctcgacaggtccactgtcccacgagcagaagctgtcacaaagcttggaaattgccttggcatccacccttggctctatgccctccttcacggcacggctgaccaggggacagctccagcaccttggcacaagagggagcaacacttcctggaggcctggcaccggctcggagcagcctgggagcatcctgggccccgaatgtgcctcctgcaaaagagtattttctccctacttcaaaaaggagccggtgtaccagctgccctgcggccacctcctgtgccgaccctgcctgggtgagaagcaacgctccctgcccatgacgtgcacagcctgccagcggccggttgctagccaagacgtgctgcgggtccacttctgagtgactgacctccactggaggagacccattgctgggaggagctgagggggaacaggagcagggccacagcacccctgaggtctggccaggccccaggcacagagctgcctgctccctcccggggctcttcttcatcacctcacggtatagcacattgcttctgcgctggtggcaatagggcaacaaagccataggccagagggcggggggatgtccctgcctccctgccaccccccctgcctgagcccaggacccactggagccagccccaccctaggcaggaagacccctgctgagggcccccccgtgcagtccgcatacccccctgtccagcagggcactgtgggtggctcaccctagattgtggcccagatctcaggagtctctgccttcagggtcatccaaaagtggaccttgggagcagtgggggtgtctgtggagtgcatgactcagccccccgactcgcagccttaataaagcgatggttgacgtctgctgtgggtttcctcctggtggagtgcctgtctgtgtcacacactcctgtcgcccacctgcacccacacaagtggagctcacagggtagctgtgtgcagtcactgcagcttgccaggctgtcattcctgtcgatgacctgaaaggacacaaactggaattttcaggtctgtcccctgcatggggactcagaacccaggtttgcaggtgggcatacgtggtgggagggtggagggctccctctggccagtgccagctgtgctcagctggcttcagaaactgctccctgagggggagcgcagcgtttcctcatgcagttggtttcaggaaaaatacttgtttataggctgcatccttttttcagcccaacatttagctttatggagtgccaaagggaaaatatatccatatccctacaacttggtactctatcagattccagccactagaagaacctcagtgagaaaacacacccgcctttccctgttcccttctaagcacgtttgggaaggaacagcctaaagatgctttgtaaagctgtattttacccttgagcttagccgcgggtccctgtgaaccggcacattcctttcctttaggccgtccagagctctagtccacacccaatactttagagatctgggtttggggttagttgcttttttttttttttttttaattgagacagggttggtctctgttgcccaagcttgagggcagtggtgcaatcataactcattgcagcctcgaactcctgggcttaagggatccttctacctcagcctcccaggtagcaggaactataggcatgtgccaccatgcccagctaatttttttattttttgtagagacaaggtcttgctatgttgtccagactggtctcaaactcctgggctcaagcgatcctcccaaagtgcttggattgcaggcatgagccacttcgcctagccaagcctgcatttttttgagttcctacatcatttgtccacaaagatggcttcagagaggtggtcacatgctttgctctgcttcctcttggcactgaccttgatgcagccttcacatgagatttgagggtccgcatggatggcctgtgccgccctcgctggcgaggctcctgtgtgcccctggctttctgggtctgtgcctctccagaatcttgtcttaccctccggtgtgcttgtgttcttagaaaagccccagcatggccgggcatggtggctcatgcctattatcccagcactttgggaggccaaggtgggtggatcacttgaggtcaagagttcgagaccagcctggccaacatggcaaaaccccatctctactaaaaatacaaaaattagctgggcatggtggtgtgtgcctgtaatgccagctactcaggaggctgaggcatgagaatcgcttgaaccggggaggcagaggttgcagtgagccgagatctcaccactgtactccagcctgggcgacggagtgagactccctctcaaaaaaagaaaaaagccccagcatgtagcaaaagcatttcttggtgagtgtgggggctggtgattcccaccttcaccctgtcatggtctcagggaacagcctgcttcccaccagcagcttgacacccacagtgtgctctggctgctgggagcccatctctcggagaaaccctgtccacccaaccccgagagccctagcgtgcagtcagcgtcagcacggcgctcccagatgagggccggactgcctccccttaagcagctgtgttggaggtactgcccagaccgctgcaggtccctggggatctgcatttctaacaggctcctgcccccaagactgctctggtggaaaatccagcctgggagcccctggagtggcaggccctgtcctgggtacaggtggagccacccccaggagttgcgtgtgtttttcttaattgaaagacttcccccaaaaggaagtggtcttttcactacccttgccagaaacatgctaggcaccactgggctctgtttctgtcccctagaaaatgggaataaaatttcttttgctgtcaaaaaaaaaaaaaaaaaa

SEQ ID NO: 57173 - DNA, 4648 bp, Homo Sapiens; identical to SEQ ID NO: 29256

SEQ ID NO: 57174 - DNA, 6914 bp, Homo Sapiens; identical to SEQ ID NO: 29056

SEQ ID NO: 57175 - DNA, 3132 bp, Homo Sapiens; identical to SEQ ID NO: 29030

SEQ ID NO: 57176 - DNA, 5190 bp, Homo Sapiens
tgggaatccaactgaagagcagccagaggagagctgaagagaggagggggaggccgatgacctgggctctgggcctctgaaggtctggcgtattctgacaggacacagtgagcatctgtagaggagaggcttgaaataaaggaggagcacgaatattccctggatttctggaggcctgctttaaggctggccagttctgcaagaaaggcaaggaggaggagactggctcacacctctggaggacccccttctgtcagctgtggggcttgacactacttgaacaagaaaaggagggggaaactgcaccacataagtgaagatccacctccagtggctgctctgctggtggtggggttgctgctgacaaccaccctcaacgggtctgcacccatccaggaaatctctgtcttcctcaagcttggttgtgcctgttctacactctatctgtattattgaattactgactgagactgtgtttgggaaggaggctgagtgactactggactggatattgactctaactcttgtttccaagcttatatcctcaatcacctaaagatcagagtgtgaagaaacaaacctgtgacagatctgtggttgaggtttagactgggggaggagtatagtactggactttctttgtaacttgtaccatgactggggcagagattgagtctggtgcccaggtcaagcctgaaaagaagcctggggaagaggttgtaggtggggctgagatagagaatgatgtccctctggtggtcagacccaaggttaggacccaggcccagataatgcctggggcaaggcccaagaataagtccaaggttatgcctggagcaagcaccaaagttgagacaagtgcagtgggtggggcacgccctaagagtaaggccaaggcaatacctgtttcacgatttaaggaagaagcccagatgtgggctcagcccaggtttggtgctgaaagattgtctaagacagagagaaactcccagaccaatatcatagcctctccacttgtcagtactgattctgtcttggttgctaaaacaaagtacctgtctgaggatagagaactggttaatacagacactgagagctttcctagaaggaaggcccattaccaagcaggattccagccttcttttaggtcaaaggaggagaccaatatggggtcctggtgctgtcctaggcctacatccaaacaagaagcctctcctaattctgatttcaaatgggtagacaaatctgtgagttccttgttctggagtggagatgaggtcactgcaaaatttcatcctgggaatagggtaaaagacagtaacagatccatgcacatggccaatcaagaggctaataccatgtctaggtcccaaactaaccaggagctctatattgcatctagttctggttctgaggatgagtctgttaagacaccctggttctgggccagagataaaaccaatacctggtctgggcccagggaagatcccaatagcaggtccaggtttaggtctaagaaagaagtctatgttgaatcaagttctggatctgagcatgaagaccatttggagtcctggtttggggctggaaaggagggcaaattcaggtccaaaatgagagctgggaaggaggccaataacagggccaggcacagggccaagcgagaagcttgcattgatttcatgcctgggtctatagatgtaattaaaaaagagtcctgtttctggcctgaagaaaatgctaataccttttcaaggcccatgatcaagaaagaggccagggccagagcaatgacaaaggaagaggccaaaaccaaggcccgagccagggccaagcaagaagccaggtcagaggaggaagccctcattgggacctggttctgggctacagacgagtccagcatggcagatgaagccagcatagagtccagtctacaagtggaggatgagtccataattgggagttggttctggactgaagaagaggccagtatggggactggggctagcagtaaatccagaccaaggactgatggggagcgtattggtgattccttatttggggctagggaaaagaccagtatgaaaactggggctgaggccacctctgaatctatactagcagctgatgatgaacaggtcattattggttcctggttctgggctggtgaagaggtcaaccaagaggctgaggaagagaccatttttgggtcgtggttctgggtcattgatgcggccagtgtggaatctggtgttggggtcagctgtgagtccaggacaaggtctgaggaagaagaggtcattggtccctggttttggtctggagaacaagttgatatagaggctggaatcggagaagaggccaggccaggagctgaagaagagacaatattcgggtcctggttttgggctgaaaaccagacctatatggattgtagggctgaaactagctgtgacaccatgcaaggggctgaggaggaggagcccattattgggtcctggttttggaccagagtagaagcttgtgtggagggtgatgtcaacagcaagtctagcctggaggacaaggaagaggccatgataccatgttttggagccaaagaagaggtcagtatgaagcatgggactggtgtcagatgcagatttatggcaggggctgaggagaccaataataagtcttgcttctgggcagaaaaagaaccctgtatgtatcctgccggtggaggaagttggaagtctaggccagaggaggaagaggacattgtcaattcgtggttctggtccagaaaatacacaaagccagaggccattatagggtcctggttatgggctacagaagagagtaatatagatgggactggagaaaaggccaagttactgactgaagaggagaccataatcaattcctggttctggaaagaagatgaagccatttcagaggctactgacagagaagagtccaggccagaagctgaggagggggacattgttggttcttggttctgggctggagaagaggacagactagagccagctgctgagactagagaagaagacaggctagcagctgagaaagaaggtattgttgggtcctggtttggggccagagaagagaccattagaagagaggctgggtcttgcagcaaatccagtcctaaagctgaagaggaagaagtcattattgggtcctggttctgggaagaagaggccagtccggaggcagtggcaggagtcggctttgagtcaaagcctgggactgaggaggaagaaatcactgttgggtcctggttctggcctgaagaagaagccagtatacaggctggatctcaggcagtagaggaaatggagtcagagactgaagaggaaaccatttttgggtcctggttctgggatggaaaagaagtcagtgaagaagcaggaccatgctgtgtatccaagccagaggatgatgaagagatgattgttgagtcctggttctggtctagagacaaagccattaaggaaactggaactgtggccacctgtgagtccaagccagaaaatgaggaaggggccattgttgggtcttggtttgaggctgaagatgaggtagataacaggactgacaatggaagcaactgtgggtccaggacattagctgatgaagatgaggccatagtggggtcctggttctgggcaggagatgaggcccattttgaatcaaatcctagccccgtgttcagggccatttgcaggtccacgtgttcagttgaacaggagcctgatccttcacgcaggcctcagagttgggaggaggtcactgttcagttcaagcctggtccatggggtagggtcggcttcccatctataagcccctttagatttccgaaagaggcagcatctttattctgtgaaatgtttgggggcaaacccaggaacatggtacttagcccagaaggggaagatcaggaatctttgcttcagcctgatcagcctagtcctgagttcccatttcagtatgatccttcctacaggtcagtccaggaaattcgagagcatcttagggccaaggagagtacagagcctgagagttcatcctgtaactgcatacaatgtgagctgaaaattggttctgaagagtttgaagaactccttttattaatggaaaaaattcgggatccttttattcatgaaatatctaaaatcgcaatgggtatgagaagtgcttctcaatttacccgagatttcattcgagattcaggtgttgtctcacttattgaaaccttgcttaattatccgtcctcccgagttagaacaagttttttggaaaatatgattcgcatggccccaccttatccgaatctaaacataattcagacatacatatgtaaagtgtgtgaggaaacccttgcttatagcgtggattccccggaacagctgtctggaataaggatgattagacatctcactactactactgactatcacacactggttgccaattatatgtctgggtttctctccttattagctacaggcaatgccaaaacaaggtttcatgttttgaaaatgctactgaatttgtctgaaaatcttttcatgacaaaagaactactcagtgctgaagcagtgtcagaatttataggcctctttaacagggaagagacaaatgacaatattcaaattgttcttgcaatatttgagaatattggcaacaatatcaaaaaagaaacagtgttctctgatgatgatttcaatattgagccgcttatttctgcattccacaaagttgagaaatttgctaaggaactgcaaggcaaaacagacaatcaaaatgaccctgaaggggaccaagaaaattagtaatggttaattgctggcctcagattgtccttatgttcctgagttatgatccttgagtaatgctttgattttaatagttggttctgtgttgcaacatatatctttagtgctgacactaactttgtccaactctgtctgtaagctggagcatttttctgatgccagctgaatattagagctgaaaacacatttgttgatatttgtcttgtccacattgtgatgttcagtatttgagcttatagtgaactgagcaatcataaataagccacccttctgattgtcgttctactgtatatatatatatatttgagtgttgtttgtgtttcaataaagtcctatgttaaagttg

SEQ ID NO: 57177 - DNA, 4536 bp, Homo Sapiens
agctcagtgtgtggtgagcggcggcggcgcggccgggccggggagcgggcgcggcccggcggcctcagcatggaggacggcttctccagctacagcagcctgtacgacacgtcctcgctgctccagttctgcaacgatgacagcgcttctgctgcaagtagcatggaggtgacagaccgcattgcttcactggagcagagagtccagatgcaagaagacgacatccagctgctcaaatcagctctagctgatgtggttcggcggctgaacattactgaggaacagcaggccgtgcttaacaggaaaggacctaccaaagcaagaccactgatgcagaccctgcctttaagaaccacggtcaacaatggcactgtgttaccaaagaaacctactggctctctaccatccccctccggggtcaggaaagaaactgctgtgccagcaaccaaaagattaaacagatctgtgagtcttctcaatgcttgcaaactgaatagatcgacaccaagtaacatcaagaggaccagctcttctgaacgagtgtctcctgggggtcgaagggaaagcaatggggattccagaggaaaccggaatcgcacaggctccaccagcagctcttccagtggcaaaaagaacagtgaaagcaaacccaaggagcctgtattcagtgcagaagaaggctatgtaaaaatgtttcttcgtggacgccctgttaccatgtacatgcccaaagatcaagtggattcttacagcttggaagcaaaagtagaacttccaaccaagagactcaagctggaatgggtctatgggtacaggggtcgagactgccgtaacaacctgtacttgcttccgacgggagagaccgtctacttcatcgcatccgtggtggtgttatacaacgtggaggagcaactgcagaggcattacgctggccacaacgatgacgtgaagtgcctagcagttcatcctgatcggatcacgatagcaacaggacaagttgcgggcacatcgaaggatggaaaacaattgcccccacatgtgcgcatctgggattctgtgacattgaatactctccacgtcattggaataggtttttttgaccgagcagtcacctgtattgcattctcaaaatctaatggaggaaccaatctctgtgctgtggatgactccaacgaccatgtgctctctgtatgggactggcagaaagaagaaaaactagcagatgtgaagtgctctaatgaagctgtgtttgctgcggatttccaccccacggacaccaacatcatagttacttgtggaaaatcacatctctacttttggacactagaaggaagctcccttaataagaagcaaggattattcgagaaacaagaaaagccaaagtttgtcctctgtgtgactttctctgaaaacggtgacaccattactggagattcaagtggcaacatcttagtatggggaaaaggtacaaatcgaataagctatgcagttcagggggcccatgagggtggcatttttgcactttgtatgttaagagatggcacactggtgtcgggaggtgggaaagaccgaaagctcatttcttggagcggaaactatcaaaaacttcgtaaaacggagattccagaacagtttggtccaatacggacagtggccgaggggaaaggcgatgtgatcttgattggcacaactcgaaactttgtcctgcagggcactctgtcaggggacttcacacccattactcagggtcacactgatgagctctggggactggccatccatgcctcaaaatctcagttcttgacctgtgggcatgacaagcatgccactctctgggacgctgtgggtcaccgtcccgtctgggacaaaataatagaggatccagctcagtcttctggttttcatccttcagggtctgtggttgcagtcggaacactcactgggaggtggtttgtgtttgacacagaaacaaaagacttggtcaccgttcacacagatggaaacgaacagctctctgtaatgcgatactcaccagatgggaatttcttagccataggctcacatgacaactgcatctatatatatggcgttagtgacaacgggaggaagtacacgcgagtgggcaagtgctcgggtcattccagcttcattactcacctggactggtctgtaaactcacagttcctcgtgtcaaattccggagactacgaaatcctctactgggttccctctgcctgtaagcaagtcgtaagtgtggaaactacaagagacattgaatgggctacctatacctgcactttgggattccatgtttttggagtgtggccagaaggctcggacggaaccgacatcaatgccgtctgtcgggcccatgagaagaaactcctgtcaacaggcgacgactttggcaaagtgcacctcttctcatacccctgctcgcagttcagggctccaagccacatctacggcgggcacagcagccatgtcaccaatgtcgatttcctctgtgaagacagccacctcatctccacgggcgggaaagacacaagcatcatgcagtggcgcgtcatttagtacccaccgagagctgtggggagcagcatgggcaaggaagacacagactcgcattacccttggtcactgtgatttctgttttgtttaaaaaattcttacaaacctcaggaaaactgtgccctccgccggctaccttagcttagcgtgtcagcgggcgccacagcggatcagcggttccgtgttcacttttgttgtacaatatatgacacagtgcacattgaataccaacaaggttgcaacgtttacattatagccacatcaacagaagtaactggtatattcttagtaacttttctatgaactcttcaaaaatggtcacagaatgccttttaaaacattgtatataatcttcactgtttcaccatctagcttgctaagtcaaatatttatgatgataatgaggtactgaaccacgatggctgttgaggaattggtcctaaaaggacagatcacttcagaagagtgaataactgatttgcacagctgaatcaggagacacaaagatgagactgtgtttggttacattttccaaagtttcattgcattctcccttggggaggctgtgagagagggcttgtatccctcttgtgctaagcagactctactcctaactgacttcaatatttcagcagggtacacaggcgtttccaagtttcagtgacaccgtcctgcctaaccagatgcggtcagcctcttcacacccacctggcttgcatcccccatcccttgttcacacgccctgattcacggtgagacattttgccaccttcttgtgtatattacttggcatgagatgatattgtacttgtataggattctagcaattcataataaatatgtaagactaggctttactgtcttatgcttatggacattgtatatttgtattttatgaccaagtagaccaagtcagaaagatctctctcgagcgtaccataaacctgcagagagaagtctcgaaaggctccaccaggtaccaagggcagctgcttttcctgtcttttgtgcatgggcgacccattacagtatgagataagattgagttctgatgcgttaaacggaggtggcagaaatttgtcaagaaggccttatccatttcgattgtgtgacagattgaaatttattgtttacattggggaatgtatctcaaatttttaaatagaagagtaataaacagactttaaagcaaatattaagatttttactcattcaaggcaagtaaatgaatggaattatctgagctctatggcactggttgtttagagtgactgatgaagtgcaactttcaaaaacatttttgatgacatcaccagcctactgcagaagtgcagggcaccagtaaacaccatgtattattgaagatgaatctgtttgtatgtatccttgtcaaatatattctataatgaaataaaatctgaaaagtggatttcttattgacctatattcatgaaagcatataaattaaaatatttaaaattagatatgattcacactatattctgtttcatatgcagattttattctcacctgggccatttgcagatgagactgtagtttgcagatgagactgtagtttgcagatggcgtggaagcattcatcaggggagataaccataaaggatttggcctaattaccatactcaattgtcagtttacgtggttttgtgaatactggcaaaagcaattgtttttaaattaacaatggagagaatgataagatgagggaaggaaaaggcattcattattgacttacatgtcagtaaggtctgcttttatttctatgtactcctgtttgccaagctcaataatggacaaaggatacaaacacacacacatctactattttagataaatgtactgttatatatatatgtaaactactattgctctctttataatgattaatcactttattatgaatgaatgaatgaatttgatggatttaaaaaaaaaaaaaaaaaa

SEQ ID NO: 57178 - DNA, 2211 bp, Homo Sapiens
ttatgcaagaaactgttgaattagacccgtttcctatagatgagaaaccatacaagctgtggtatttatgagcctccatttcttatactactgcagtgaaccaacattggatgtgaaaattgccttttgtcagggattcgataaacaagtggatgtgtcatatattgccaaacattacaacatgagcaaaagcaaagttgacaaccagttctacagtgtggaagtgggagactcaaccttcacagttctcaagcgctaccagaatctaaagcctattggctctggggctcagggcatagtttgtgccgcgtatgatgctgtccttgacagaaatgtggccattaagaagctcagcagaccctttcagaaccaaacacatgccaagagagcgtaccgggagctggtcctcatgaagtgtgtgaaccataaaaacattattagtttattaaatgtcttcacaccccagaaaacgctggaggagttccaagatgtttacttagtaatggaactgatggatgccaacttatgtcaagtgattcagatggaattagaccatgagcgaatgtcttacctgctgtaccaaatgttgtgtggcattaagcacctccattctgctggaattattcacagggatttaaaaccaagtaacattgtagtcaagtctgattgcacattgaaaatcctggactttggactggccaggacagcaggcacaagcttcatgatgactccatatgtggtgacacgttattacagagcccctgaggtcatcctggggatgggctacaaggagaacgtggatatatggtctgtgggatgcattatgggagaaatggttcgccacaaaatcctctttccaggaagggactatattgaccagtggaataaggtaattgaacaactaggaacaccatgtccagaattcatgaagaaattgcaacccacagtaagaaactatgtggagaatcggcccaagtatgcgggactcaccttccccaaactcttcccagattccctcttcccagcggactccgagcacaataaactcaaagccagccaagccagggacttgttgtcaaagatgctagtgattgacccagcaaaaagaatatcagtggacgacgccttacagcatccctacatcaacgtctggtatgacccagccgaagtggaggcgcctccacctcagatatatgacaagcagttggatgaaagagaacacacaattgaagaatggaaagaacttatctacaaggaagtaatgaattcagaagaaaagactaaaaatggtgtagtaaaaggacagccttctccttcaggtgcagcagtgaacagcagtgagagtctccctccatcctcgtctgtcaatgacatctcctccatgtccaccgaccagaccctggcatctgacactgacagcagcctggaagcctcggcaggacccctgggttgttgcaggtgactagccgcctgcctgcgaaacccagcgttcttcaggagatgatgtgatggaacacacacacacgcagacacacacacacacacaaatgcagacacacaacatcaagaaaacagcaagggagagaatccaagcctaaaattaaataaatctttcagcctgcttcttccccagggttctgtattgcagctaagctcaaatgtatatttaacttctagttgctcttgctttggtcttcttccaatgatgcttactacagaaagcaaatcagacacaattagagaagccttttccataaagtgtaattttaatggctgcaaaaccggcaacctgtaactgcccttttaaatggcatgacaaggtgtgcagtggccccatccagcatgtgtgtgtctctatcttgcatctacctgctccttggcctagtcagatggatgtagatacagatccgcatgtgtctgtattcatacagcactacttacttagagatgctactgtcagtgtcctcagggctctaccaagacataatgcactggggtaccacatggtccatttcatgtgatctattactctgacataaacccatctgtaatatattgccagtatataagctgtttagtttgttaattgattaaactgtatgtcttataagaaaacatgtaaagggggaatatatggggggagtgagctctctcagacccttgaagatgtagcttccaaatttgaatggattaaatggcacctgtatacca

SEQ ID NO: 57179 - DNA, 2824 bp, Homo Sapiens; identical to SEQ ID NO: 30949

SEQ ID NO: 57180 - DNA, 5052 bp, Homo Sapiens; identical to SEQ ID NO: 32026

SEQ ID NO: 57181 - DNA, 3649 bp, Homo Sapiens
agtcccagcccaagggtagctggaggcgcgcaggccggctccgctccggccccggacgatgcggcgcgcccaggatgctgccgtgcctcgtagtgctgctggcggcgctcctcagcctccgtcttggctcagacgctcatgggacagagctgcccagccctccgtctgtgtggtttgaagcagaatttttccaccacatcctccactggacacccatcccaaatcagtctgaaagtacctgctatgaagtggcgctcctgaggtatggaatagagtcctggaactccatctccaactgtagccagaccctgtcctatgaccttaccgcagtgaccttggacctgtaccacagcaatggctaccgggccagagtgcgggctgtggacggcagccggcactccaactggaccgtcaccaacacccgcttctctgtggatgaagtgactctgacagttggcagtgtgaacctagagatccacaatggcttcatcctcgggaagattcagctacccaggcccaagatggcccccgcaaatgacacatatgaaagcatcttcagtcacttccgagagtatgagattgccattcgcaaggtgccgggaaacttcacgttcacacacaagaaagtaaaacatgaaaacttcagcctcctaacctctggagaagtgggagagttctgtgtccaggtgaaaccatctgtcgcttcccgaagtaacaaggggatgtggtctaaagaggagtgcatctccctcaccaggcagtatttcaccgtgaccaacgtcatcatcttctttgcctttgtcctgctgctctccggagccctcgcctactgcctggccctccagctgtatgtgcggcgccgaaagaagctacccagtgtcctgctcttcaagaagcccagccccttcatcttcatcagccagcgtccctccccagagacccaagacaccatccacccgcttgatgaggaggcctttttgaaggtgtccccagagctgaagaacttggacctgcacggcagcacagacagtggctttggcagcaccaagccatccctgcagactgaagagccccagttcctcctccctgaccctcacccccaggctgacagaacgctgggaaacggggagccccctgtgctgggggacagctgcagtagtggcagcagcaatagcacagacagcgggatctgcctgcaggagcccagcctgagccccagcacagggcccacctgggagcaacaggtggggagcaacagcaggggccaggatgacagtggcattgacttagttcaaaactctgagggccgggctggggacacacagggtggctcggccttgggccaccacagtcccccggagcctgaggtgcctggggaagaagacccagctgctgtggcattccagggttacctgaggcagaccagatgtgctgaagagaaggcaaccaagacaggctgcctggaggaagaatcgcccttgacagatggccttggccccaaattcgggagatgcctggttgatgaggcaggcttgcatccaccagccctggccaagggctatttgaaacaggatcctctagaaatgactctggcttcctcaggggccccaacgggacagtggaaccagcccactgaggaatggtcactcctggccttgagcagctgcagtgacctgggaatatctgactggagctttgcccatgaccttgcccctctaggctgtgtggcagccccaggtggtctcctgggcagctttaactcagacctggtcaccctgcccctcatctctagcctgcagtcaagtgagtgactcgggctgagaggctgcttttgattttagccatgcctgctcctctgcctggaccaggaggagggcccctggggcagaagttaggcacgaggcagtctgggcacttttctgcaagtccactggggctggccccagccaggccctgcagggctggtcagggtgtctggggcaggaggaggccaactcactgaactagtgcagggtatgtgggtggcactgacctgttctgttgactggggccctgcagactctggcagagctgagaagggcagggaccttctccctcctaggaactctttcctgtatcataaaggattatttgctcaggggaaccatggggctttctggagttgtggtgaggccaccaggctgaagtcagctcagacccagacctccctgcttaggccactcgagcatcagagcttccagcaggaggaagggctgtaggaatggaagcttcagggccttgctgctggggtcatttttaggggaaaaaggaggatatgatggtcacatggggaacctcccctcatcgggcctctggggcaggaagcttgtcactggaagatcttaaggtatatattttctggacactcaaacacatcataatggattcactgaggggagacaaagggagccgagaccctggatggggcttccagctcagaacccatccctctggtgggtacctctggcacccatctgcaaatatctccctctctccaacaaatggagtagcatccccctggggcacttgctgaggccaagccactcacatcctcactttgctgccccaccatcttgctgacaacttccagagaagccatggttttttgtattggtcataactcagccctttgggcggcctctgggcttgggcaccagctcatgccagccccagagggtcagggttggaggcctgtgcttgtgtttgctgctaatgtccagctacagacccagaggataagccactgggcactgggctggggtccctgccttgttggtgttcagctgtgtgattttggactagccacttgtcagagggcctcaatctcccatctgtgaaataaggactccacctttaggggaccctccatgtttgctgggtattagccaagctggtcctgggagaatgcagatactgtccgtggactaccaagctggcttgtttcttatgccagaggctaacagatccaatgggagtccatggtgtcatgccaagacagtatcagacacagccccagaagggggcattatgggccctgcctccccataggccatttggactctgccttcaaacaaaggcagttcagtccacaggcatggaagctgtgaggggacaggcctgtgcgtgccatccagagtcatctcagccctgcctttctctggagcattctgaaaacagatattctggcccagggaatccagccatgacccccacccctctgccaaagtactcttaggtgccagtctggtaactgaactccctctggaggcaggcttgagggaggattcctcagggttcccttgaaagctttatttatttattttgttcatttatttattggagaggcagcattgcacagtgaaagaattctggatatctcaggagccccgaaattctagctctgactttgctgtttccagtggtatgaccttggagaagtcacttatcctcttggagcctcagtttcctcatctgcagaataatgactgacttgtctaattcgtagggatgtgaggttctgctgaggaaatgggtatgaatgtgccttgaacacaaagctctgtcaataagtgatacatgttttttattccaataaattgtcaagaccaca

SEQ ID NO: 57182 - DNA, 2621 bp, Homo Sapiens
cagtgtttggtgttgcaagcaggatccaaaggagacctatagtgactcccaggagctcttagtgaccaagtgaaggtacctgtggggctcattgtgcccattgctctttcactgctttcaactggtagttgtgggttgaagcactggacaatgccacatactttgtggatggtgtgggtcttgggggtcatcatcagcctctccaaggaagaatcctccaatcaggcttctctgtcttgtgaccgcaatggtatctgcaagggcagctcaggatctttaaactccattccctcagggctcacagaagctgtaaaaagccttgacctgtccaacaacaggatcacctacattagcaacagtgacctacagaggtgtgtgaacctccaggctctggtgctgacatccaatggaattaacacaatagaggaagattctttttcttccctgggcagtcttgaacatttagacttatcctataattacttatctaatttatcgtcttcctggttcaagcccctttcttctttaacattcttaaacttactgggaaatccttacaaaaccctaggggaaacatctcttttttctcatctcacaaaattgcaaatcctgagagtgggaaatatggacaccttcactaagattcaaagaaaagattttgctggacttaccttccttgaggaacttgagattgatgcttcagatctacagagctatgagccaaaaagtttgaagtcaattcagaatgtaagtcatctgatccttcatatgaagcagcatattttactgctggagatttttgtagatgttacaagttccgtggaatgtttggaactgcgagatactgatttggacactttccatttttcagaactatccactggtgaaacaaattcattgattaaaaagtttacatttagaaatgtgaaaatcaccgatgaaagtttgtttcaggttatgaaacttttgaatcagatttctggattgttagaattagagtttgatgactgtacccttaatggagttggtaattttagagcatctgataatgacagagttatagatccaggtaaagtggaaacgttaacaatccggaggctgcatattccaaggttttacttattttatgatctgagcactttatattcacttacagaaagagttaaaagaatcacagtagaaaacagtaaagtttttctggttccttgtttactttcacaacatttaaaatcattagaatacttggatctcagtgaaaatttgatggttgaagaatacttgaaaaattcagcctgtgaggatgcctggccctctctacaaactttaattttaaggcaaaatcatttggcatcattggaaaaaaccggagagactttgctcactctgaaaaacttgactaacattgatatcagtaagaatagttttcattctatgcctgaaacttgtcagtggccagaaaagatgaaatatttgaacttatccagcacacgaatacacagtgtaacaggctgcattcccaagacactggaaattttagatgttagcaacaacaatctcaatttattttctttgaatttgccgcaactcaaagaactttatatttccagaaataagttgatgactctaccagatgcctccctcttacccatgttactagtattgaaaatcagtaggaatgcaataactacgttttctaaggagcaacttgactcatttcacacactgaagactttggaagctggtggcaataacttcatttgctcctgtgaattcctctccttcactcaggagcagcaagcactggccaaagtcttgattgattggccagcaaattacctgtgtgactctccatcccatgtgcgtggccagcaggttcaggatgtccgcctctcggtgtcggaatgtcacaggacagcactggtgtctggcatgtgctgtgctctgttcctgctgatcctgctcacgggggtcctgtgccaccgtttccatggcctgtggtatatgaaaatgatgtgggcctggctccaggccaaaaggaagcccaggaaagctcccagcaggaacatctgctatgatgcatttgtttcttacagtgagcgggatgcctactgggtggagaaccttatggtccaggagctggagaacttcaatccccccttcaagttgtgtcttcataagcgggacttcattcctggcaagtggatcattgacaatatcattgactccattgaaaagagccacaaaactgtctttgtgctttctgaaaactttgtgaagagtgagtggtgcaagtatgaactggacttctcccatttccgtctttttgatgagaacaatgatgctgccattctcattcttctggagcccattgagaaaaaagccattccccagcgcttctgcaagctgcggaagataatgaacaccaagacctacctggagtggcccatggacgaggctcagcgggaaggattttgggtaaatctgagagctgcgataaagtcctaggttcccatatttaagaccagtctttgtctagttgggatctttatgtcactagttatagttaagttcattcagacataattatataaaaactacgtggatgtaccgtcatttgagga

SEQ ID NO: 57183 - DNA, 2707 bp, Homo Sapiens
ggcaggccgagccagccgtgcgccgcgctccagggcccagggcgccgcacacgcacccacccacccacccagcctcgcagcgccatgggcaagaacaagcagccacgcggccagcagaggcaggggggcccgccggccgcggacgccgctgggcccgacgacatggagccgaagaagggcacgggggcccccaaggagtgcggggaggaggagccccggacctgctgcggctgccggttcccgctgctgctcgccctgctgcagctggccctgggcatcgccgtgaccgtggtgggcttcctcatggcgagcatcagctcctccctgctagtcagggacactccattttgggctgggatcattgtctgcttagtggcctatcttggcttgtttatgctttgtgtctcatatcaggttgacgaacggacatgtattcaattttctatgaaactgttatactttctgctgagtgccctgggcctgacggtctgtgtgctggccgtggcctttgccgcccaccactattcgcagctcacacagtttacctgtgagaccacactcgactcttgccagtgcaaactgccctcctcggagccgctcagcaggacctttgtttaccgggatgtgacggactgtaccagcgtcactggcactttcaaactgttcttactcatccagatgattcttaatttggtctgcggccttgtgtgcttgttggcctgctttgtgatgtggaaacataggtaccaggtcttctatgtgggtgtcaggatatgctccctcacggcttccgaaggcccccagcaaaagatctaacattcttgctcaaagttgcgagagaaagtagcacatggagtagctgaggttaaacaaacaaaaaaaaattttaaacaaagaaaggaaaaaaattgacaataaaagtcactcttctaattgaatatttttatatttttatgaaacaaaagagcatttcttcaggtttctattgtattttttttaacattcttgcagagaaagcaagatccaaattgattttgggatattaaaagttaacagaacactgaacaaggaaagaatggcatagatctatctttacagtctggagttaattcctgttaactcattttatccattccttacataatcttctttcctgttagtccagtttgatggtgtgaatggtgaatttcaggcccagttgctaaattttgtggcatcttcctctagtccttcccacctccagtcatcagccccactctgtcttggagacaggcaggaggtgggggaagagctgaatctctttattttccctggtagagacatcttcaaggcatgaaatagcttaaagagcagagtagaaatggaagaggctttgcaaaaggctagataactaacaacacctgggttggggcggcggcctcttctcttcagctcccttagcttggctccgtaagtggatcacttgccaaatgctttagatgattgcctctcaataattgaaaggtggtggtagttgtattctaaatgatgtagaaggtttaaaaataattacattatgcttctattctatcatctaaaacaaatcattaaaactaatttctagctaattgttaattataattatgctcagaagtctatttaatgagctctgactgtacttacgctgcactgtcggtgttaagagaaattactctcacaagagcagaggcctgaagattctttcttctgaaagccaagcaccacaaggaaaaaaaaattattaatagctcaggttaaaaacacccatttaaacaaaaacaagagcatttgtaataggaagtgtttatacaaacagcacatttgtgatatgttgaaaagcatctctcttggcaaccaatctatgtttgaggaagattgggtaatgctgatgtgttccattcatgaaactgtatttgatacataatcctattattaattcgtatgcttagtcaacctaggaaatcaaaataatgttttgaagttcttatttgagcaatatggccttgacttggagggtagttttagttgttttgtttttaagtgactgtggtttaaagcacaaatgccccaaggtggggagacttctctctgtgattattgttgctattaaattctgaactgtatccatattttaaggaaggagctaaaaatggaaattcatgaaacataaatggtatcaagaactttatcagtatgctttgttgaaagcagaaattaagataataattgagttcaattcgcctctccgcattgcctattgatacactttactaatcatgaaattctaacctaaaaggaaaacattttcctgcttgtcttagaagaaagtggaataattccactgattgtgataatggtttcaatttctacacaatataaatatccagtataaaggaaagcgttaagtcggtaagctagaggattgtaaatatcttttatgtcctctagataaaacacccgattaacagatgttaaaccttttaatgttttgatttgctttaaaaatggccttcctacacattagctccagctaaaaagacacattggagagcttagaggataagtctctggagcagaatttatcacacacaaaagttacaccaacagaataccaagcagaatgatgaggacctgtaaaataccttgtgccctattaaaaaaaaaaaaaaaaaaaaaaaaaaaaaaaaaa

SEQ ID NO: 57184 - DNA, 4347 bp, Homo Sapiens
cacggtagtcgtggcgaccaagcaacccggcaacgcgagtcaacaacaacaaccgcccggccgacccccacccccaccccccaggcccggcccggggaccccagcacgtcccgtccccttcccaacatcgactccgagacctccgaaaagcgtttccgcagacagaagtggggagaagcggaggaattaaaaaaaaaaaaaagccttatttattatcattttccccaccgttggcatggcaacacaggcgtatactgagctacaggcagccccgccaccatcccagccgccacaggccccgccacaagcccagccccagccgccaccgccaccacccccagcggcaccccagcccccgcagccacccaccgctgctgccacccctcagccccaatatgtcaccgagctgcagagcccccagccccaggcacagccaccgggtggccagaagcagtacgtgacggagctcccggctgtacccgcaccctcgcagccaaccggtgcacccaccccttcgcctgcaccccagcagtacatcgtggtcactgtctctgaaggtgccatgcgggccagcgagacagtgtcggaggccagccccggctccaccgccagccagaccggcgttcctactcaggtggttcagcaggtgcagggcacccagcagcggctgctggtccagacgagcgtgcaggccaagccaggccacgtgtcgcccctccagctgaccaacatccaagtgccccagcaggctcttcccacgcagcgtctggtggtgcagagcgcagccccaggcagcaaaggtggccaggtctccctgacggtccatggtacccagcaggtgcactcgcccccagagcagtcgccggtgcaggccaacagctcttccagcaagacagccggggcccccacgggcacagtgccacagcagctgcaggtccacggcgtccagcagagtgtccccgtcacccaagagagatctgtggtccaggccactccacaagcgcccaaacccggcccggtgcagccgctgaccgtgcagggcctccagccagtccacgtggctcaagaggtgcagcagctccagcaggtgcccgtcccacacgtgtactccagccaggtgcagtatgtggagggcggcgatgccagctacacggccagtgccatccgttccagcacctactcctatcccgagacgccgctgtacacgcagacggcaagcaccagctactacgaggccgcaggcacggccacccaggtcagcacccccgccacctcccaggcggtggccagcagtggctccatgcccatgtacgtgtccggcagccaggtcgtcgccagctccgccagcactggggctggggccagcaacagcagcggaggtggtggcagtggtggtggcggcggcggcgggggaggcggtggcgggggtggcagtggcagcaccggaggcggcggcagcggagcaggcacctacgtgatccaaggcggctacatgctgggcagtgccagccagtcttactctcacaccacccgtgcctcgccagccacggtccagtggctcctggacaactatgagacggctgagggcgtgagtctgccacggagcaccctctactgccactacttactgcactgccaggagcagaagctggagcccgtcaacgccgcctccttcggcaagctcatccgctccgtcttcatgggcctgcgaacccgccgtctgggcaccaggggcaactccaagtaccactactatggcctgcgcatcaaggccagctcacccctgctgcggctgatggaggaccagcagcacatggccatgcggggccagcccttctcgcagaagcagaggctcaagcccatccagaagatggaaggcatgaccaacggcgtggcggtggggcagcagccgagcacggggctgtcggacatcagcgcccaggtgcagcagtaccagcaatttttggatgcctctcggagcctccctgacttcacagagctcgacctccagggcaaggtgctgcctgagggcgtcgggcccggggacatcaaagccttccaggtcctgtaccgggaacactgtgaggccattgtcgacgtcatggtgaacctgcagttcaccctggtggagacgctgtggaagaccttctggaggtacaacctcagccagcccagtgaggcgccaccgctggctgtacatgacgaggccgagaagcgactgcccaaagccatcctggtgctcctctccaagttcgagcccgtgctccaatggaccaagcactgtgacaacgtgctgtaccagggcctggtggaaatcctcattcccgacgtgctgcggcccatccccagtgccttgacccaagcgatccggaactttgccaagagcctggagagctggctcacccacgccatggtcaacatccccgaggagatgctgcgggtgaaggtggccgcggctggcgccttcgcgcagacactgcggcgctacacgtcgctcaaccacctggcgcaggcggcgcgcgctgtgctgcagaacaccgcacagatcaaccagatgctgagcgacctcaaccgcgtggacttcgccaacgtgcaggagcaggcctcgtgggtgtgccgctgcgaggaccgcgtggtgcagcggctggagcaggacttcaaggtgacgctgcagcagcagaactcgctggagcagtgggcggcctggctggacggcgtggtgagccaggtgctcaagccctaccagggcagcgccggcttccccaaggccgccaagctcttcctcctcaagtggtccttctacagctccatggtgatccgggacctgaccctgcgcagcgccgccagcttcggttccttccacctcatccggctgctctacgacgagtacatgtactacctgatcgagcaccgcgtagcccaggccaagggcgagacccccatcgccgtcatgggcgagttcgccaatctggccacctccctgaaccccctggaccccgacaaagacgaggaggaagaagaggaggaggagagcgaggacgagctgccgcaggacatctcactggcggctggcggcgagtcacccgcgctgggcccggagaccctggagccgccggccaagctggcgcggactgacgcgcgcggcctcttcgtgcaggcgctgccctccagctaagcccttggcctccccgccccacccgcccccgccacccctccacgccagggtccctcaaagcttctgtggcttcgtggtcactgctccagcctcagccagggcagggagggggactccgagacagggaagaccggggccctcctcccttatggggccggcacaatcagtgggctgggcggagccgcagctgcaaactctgacacaaaagacgtgccttaaggaacccgccgcgtgcccaggtgccccgcggggcatccagctcggccccttggccgcccccctcccaggccccagcgtcttctccccagccccgtcctcccaccaccccagggggcaggcaggcaggccccctcccgtgcgaaactgttaacttattcagctcgctggctttgcacagcctgtcctgggcccagccctgagccccgggccggcgcaggtgggcgtcacctggggactccccactgtcagcagcagccccgggacaccctacccccagcaaccccactgcttccccttcttggtattaagtgcaattaaagccgtgggtgtcgcatcttctccagcgctgggccctcccttgcccccaagctcaagaagggggcactgcccggcccggctgtgaggagggcggcagggggcacggcctccagcttccaaagagcagcgagccgcggagccggggagtgcccacagaccccagcccccgcgcccccgccctccgccgctggtttgtaatggaaccttttctgtgcccctatcttcccggagaccacgcttctcctccgtgccgtgcgacccccaccccatgactattgtgcgattcgtgagcgccgcccgagcggagttggtaacttgttgggtttttttccaaccatcatggccttatctgttccagttttctcagtgttttcagcctgtgagatagatgtttatggcaagaaaaaggaaaaaaaaatggaaatctgacctattgtataaaaatcactattttgtgtgctccgcgtgctatagcttttggggcggccctgcccagtccccgtgcccacggggctccctctcccggtggtgaaagtgtccacacgtgtggtagtctagtgtgccgagctgttttctacctttttgtagtctttcttaaaacaataaattccgctgtgaaaaaaaaaaaaaaaaaa

SEQ ID NO: 57185 - DNA, 1963 bp, Homo Sapiens
gggaattctgaaagccgctggcggaccgcgcgcagcggccagagaccgagccctaaggagagtgcggcgcttcccgaggcgtgcagctgggaactgcaactcatctgggttgtgcgcagaaggctggggcaagcgagtagagaagtggagcgtaagccaggggcgttgggggccgtgcgggtcgggcgcgtgccacgcccgcggggtgaagtcggagcgcggggcctgctggagagaggagcgctgcggaccgagtaatggcaatgcagatgcagcttgaagcaaatgcagatacttcagtggaagaagaaagctttggcccacaacccatttcacggttagagcagtgtggcataaatgccaacgatgtgaagaaattggaagaagctggattccatactgtggaggctgttgcctatgcgccaaagaaggagctaataaatattaagggaattagtgaagccaaagctgataaaattctggcagtggctgagaggtatggtctctctggcagtgatgtcctggataatgtagcatatgctcgagcgttcaacacagaccaccagacccagctcctttatcaagcatcagccatgatggtagaatctaggtatgcactgcttattgtagacagtgccaccgccctttacagaacagactactcgggtcgaggtgagctttcagccaggcagatgcacttggccaggtttctgcggatgcttctgcgactcgctgatgagtttggtgtagcagtggtaatcactaatcaggtggtagctcaagtggatggagcagcgatgtttgctgctgatcccaaaaaacctattggaggaaatatcatcgcccatgcatcaacaaccagattgtatctgaggaaaggaagaggggaaaccagaatctgcaaaatctacgactctccctgtcttcctgaagctgaagctatgttcgccattaatgcagatggagtgggagatgccaaagactgaatcattgggtttttcctctgttaaaaaccttaagtgctgcagcctaatgagagtgcactgctccctggggttctctacaggcctcttcctgttgtgactgccaggataaagcttccgggaaaacagctattatatcagcttttctgatggtataaacaggagacaggtcagtagtcacaaactgatctaaaatgtttattccttctgtagtgtattaatctctgtgtgttttctttggttttggaggaggggtatgaagtatctttgacatggtgccttaggaatgacttgggtttaacaagctgtctactggacaatcttatgtttccaagagaactaaagctggagagacctgacccttctctcacttctaaattaatggtaaaataaaatgcctcagctatgtagcaaagggaatgggtctgcacagattctttttttctgtcagtaaaactctcaagcaggtttttaagttgtctgtctgaatgatcttgtgtaagggtttggttatggagtcttgtgccaaacctactaggccattagcccttcaccatctacctgcttggtctttcattgctaagactaactcaagataatcctagagtcttaaagcatttcaggccagtgtggtgtcttgcgcctgtactcccagcactttgggaggccgaggcaggtggatcgcttgagccaggagttttaagtccagcttggccaagatggtgaaatcccatctctacaaaaaatgcagaacttaatctggacacactgttacacgtgcctgtagtcccagctactctatagcctgaggtgggagaatcacttaagcctggaaggtggaagttgcagtgagtcgagattgcactgctgcattccagccagggtgacagagtgagaccatgtttcaaacaagaaacatttcagagggcaagtaaacagatttgattgtgaggcttctaataaagtagttattagtagtg

SEQ ID NO: 57186 - DNA, 5084 bp, Homo Sapiens
gatcccatcgcagctaccgcgatgagaggcgctcgcggcgcctgggattttctctgcgttctgctcctactgcttcgcgtccagacaggctcttctcaaccatctgtgagtccaggggaaccgtctccaccatccatccatccaggaaaatcagacttaatagtccgcgtgggcgacgagattaggctgttatgcactgatccgggctttgtcaaatggacttttgagatcctggatgaaacgaatgagaataagcagaatgaatggatcacggaaaaggcagaagccaccaacaccggcaaatacacgtgcaccaacaaacacggcttaagcaattccatttatgtgtttgttagagatcctgccaagcttttccttgttgaccgctccttgtatgggaaagaagacaacgacacgctggtccgctgtcctctcacagacccagaagtgaccaattattccctcaaggggtgccaggggaagcctcttcccaaggacttgaggtttattcctgaccccaaggcgggcatcatgatcaaaagtgtgaaacgcgcctaccatcggctctgtctgcattgttctgtggaccaggagggcaagtcagtgctgtcggaaaaattcatcctgaaagtgaggccagccttcaaagctgtgcctgttgtgtctgtgtccaaagcaagctatcttcttagggaaggggaagaattcacagtgacgtgcacaataaaagatgtgtctagttctgtgtactcaacgtggaaaagagaaaacagtcagactaaactacaggagaaatataatagctggcatcacggtgacttcaattatgaacgtcaggcaacgttgactatcagttcagcgagagttaatgattctggagtgttcatgtgttatgccaataatacttttggatcagcaaatgtcacaacaaccttggaagtagtagataaaggattcattaatatcttccccatgataaacactacagtatttgtaaacgatggagaaaatgtagatttgattgttgaatatgaagcattccccaaacctgaacaccagcagtggatctatatgaacagaaccttcactgataaatgggaagattatcccaagtctgagaatgaaagtaatatcagatacgtaagtgaacttcatctaacgagattaaaaggcaccgaaggaggcacttacacattcctagtgtccaattctgacgtcaatgctgccatagcatttaatgtttatgtgaatacaaaaccagaaatcctgacttacgacaggctcgtgaatggcatgctccaatgtgtggcagcaggattcccagagcccacaatagattggtatttttgtccaggaactgagcagagatgctctgcttctgtactgccagtggatgtgcagacactaaactcatctgggccaccgtttggaaagctagtggttcagagttctatagattctagtgcattcaagcacaatggcacggttgaatgtaaggcttacaacgatgtgggcaagacttctgcctattttaactttgcatttaaaggtaacaacaaagagcaaatccatccccacaccctgttcactcctttgctgattggtttcgtaatcgtagctggcatgatgtgcattattgtgatgattctgacctacaaatatttacagaaacccatgtatgaagtacagtggaaggttgttgaggagataaatggaaacaattatgtttacatagacccaacacaacttccttatgatcacaaatgggagtttcccagaaacaggctgagttttgggaaaaccctgggtgctggagctttcgggaaggttgttgaggcaactgcttatggcttaattaagtcagatgcggccatgactgtcgctgtaaagatgctcaagccgagtgcccatttgacagaacgggaagccctcatgtctgaactcaaagtcctgagttaccttggtaatcacatgaatattgtgaatctacttggagcctgcaccattggagggcccaccctggtcattacagaatattgttgctatggtgatcttttgaattttttgagaagaaaacgtgattcatttatttgttcaaagcaggaagatcatgcagaagctgcactttataagaatcttctgcattcaaaggagtcttcctgcagcgatagtactaatgagtacatggacatgaaacctggagtttcttatgttgtcccaaccaaggccgacaaaaggagatctgtgagaataggctcatacatagaaagagatgtgactcccgccatcatggaggatgacgagttggccctagacttagaagacttgctgagcttttcttaccaggtggcaaagggcatggctttcctcgcctccaagaattgtattcacagagacttggcagccagaaatatcctccttactcatggtcggatcacaaagatttgtgattttggtctagccagagacatcaagaatgattctaattatgtggttaaaggaaacgctcgactacctgtgaagtggatggcacctgaaagcattttcaactgtgtatacacgtttgaaagtgacgtctggtcctatgggatttttctttgggagctgttctctttaggaagcagcccctatcctggaatgccggtcgattctaagttctacaagatgatcaaggaaggcttccggatgctcagccctgaacacgcacctgctgaaatgtatgacataatgaagacttgctgggatgcagatcccctaaaaagaccaacattcaagcaaattgttcagctaattgagaagcagatttcagagagcaccaatcatatttactccaacttagcaaactgcagccccaaccgacagaagcccgtggtagaccattctgtgcggatcaattctgtcggcagcaccgcttcctcctcccagcctctgcttgtgcacgacgatgtctgagcagaatcagtgtttgggtcacccctccaggaatgatctcttcttttggcttccatgatggttattttcttttctttcaacttgcatccaactccaggatagtgggcaccccactgcaatcctgtctttctgagcacactttagtggccgatgatttttgtcatcagccaccatcctattgcaaaggttccaactgtatatattcccaatagcaacgtagcttctaccatgaacagaaaacattctgatttggaaaaagagagggaggtatggactgggggccagagtcctttccaaggcttctccaattctgcccaaaaatatggttgatagtttacctgaataaatggtagtaatcacagttggccttcagaaccatccatagtagtatgatgatacaagattagaagctgaaaacctaagtcctttatgtggaaaacagaacatcattagaacaaaggacagagtatgaacacctgggcttaagaaatctagtatttcatgctgggaatgagacataggccatgaaaaaaatgatccccaagtgtgaacaaaagatgctcttctgtggaccactgcatgagcttttatactaccgacctggtttttaaatagagtttgctattagagcattgaattggagagaaggcctccctagccagcacttgtatatacgcatctataaattgtccgtgttcatacatttgaggggaaaacaccataaggtttcgtttctgtatacaaccctggcattatgtccactgtgtatagaagtagattaagagccatataagtttgaaggaaacagttaataccattttttaaggaaacaatataaccacaaagcacagtttgaacaaaatctcctcttttagctgatgaacttattctgtagattctgtggaacaagcctatcagcttcagaatggcattgtactcaatggatttgatgctgtttgacaaagttactgattcactgcatggctcccacaggagtgggaaaacactgccatcttagtttggattcttatgtagcaggaaataaagtataggtttagcctccttcgcaggcatgtcctggacaccgggccagtatctatatatgtgtatgtacgtttgtatgtgtgtagacaaatatttggaggggtatttttgccctgagtccaagagggtcctttagtacctgaaaagtaacttggctttcattattagtactgctcttgtttcttttcacatagctgtctagagtagcttaccagaagcttccatagtggtgcagaggaagtggaaggcatcagtccctatgtatttgcagttcacctgcacttaaggcactctgttatttagactcatcttactgtacctgttccttagaccttccataatgctactgtctcactgaaacatttaaattttaccctttagactgtagcctggatattattcttgtagtttacctctttaaaaacaaaacaaaacaaaacaaaaaactccccttcctcactgcccaatataaaaggcaaatgtgtacatggcagagtttgtgtgttgtcttgaaagattcaggtatgttgcctttatggtttcccccttctacatttcttagactacatttagagaactgtggccgttatctggaagtaaccatttgcactggagttctatgctctcgcacctttccaaagttaacagattttggggttgtgttgtcacccaagagattgttgtttgccatactttgtctgaaaaattcctttgtgtttctattgacttcaatgatagtaagaaaagtggttgttagttatagatgtctaggtacttcaggggcacttcattgagagttttgtcttgccatactttgtctgaaaaattcctttgtgtttctattgacttcaatgatagtaagaaaagtggttgttagttatagatgtctaggtacttcaggggcacttcattgagagttttgtcaatgtcttttgaatattcccaagcccatgagtccttgaaaatattttttatatatacagtaactttatgtgtaaatacataagcggcgtaagtttaaaggatgttggtgttccacgtgttttattcctgtatgttgtccaattgttgacagttctgaagaattc

SEQ ID NO: 57187 - DNA, 3252 bp, Homo Sapiens; identical to SEQ ID NO: 29344

SEQ ID NO: 57188 - DNA, 5693 bp, Homo Sapiens
ccggtccccacctgggtggaccggacagcctcttgggcttctggtaaaatgagttagctcttaaattttcacacatataaagcactagacttgctaccgtgaatgatgtaagagatcaccgtgaggaggagggctcctggaagcttgccccgtcgcggggaaaagcgggtgcaggatggggctgaagtggattctcctcgcggtgttggaatggacctgccgtgtcatgggaagcctgtctacgcacttatcctgcatgggattttcaagccgtttataccagagaggccacagaacccttgcctcggaatccgtgtatgtggtctccctgcagtccatgaactctcagggccggagccaaccagtctacagggctgccctaacaaagcgaaagatttcagaagaggacgaattggatgtacctgacgacatcagcgtccgggttatgtcatctcagtctgtgcttgtgtcctgggtggatcctgttctggaaaaacagaagaaagttgttgcatcaagacagtacaccgtgcgctatcgagagaagggggaattggccaggtgggattataagcagatcgctaacaggcgtgtgctgattgagaacctgattccagacactgtgtatgaatttgcagtccgtatttcacagggtgaaagagatggcaaatggagtacgtcagtcttccaaagaacaccagaatctgcccctaccacagctcctgaaaacttgaacgtctggccagtcaatggcaaacctacagttgtcgctgcatcttgggatgcgctaccagagactgaggggaaagtgaaagaatacattctttcatacgccccggctctcaaaccatttggagcaaagtccctcacctatcctggagacactacttctgccctggtggatggtctgcagcctggggaacgctatcttttcaaaatccgggccacaaacaggagaggcctgggacctcactccaaagccttcattgtcgctatgccaacaaccagtaaggcggatgttgagcagaacacggaggacaatgggaaacccgaaaaacctgagccttcctcaccttctcccagagctccagcttcctcccaacacccctctgtgcctgcttctccccaagggagaaatgccaaggaccttcttcttgacttgaagaacaaaatattggctaatggtggggcgccccgaaaaccccagcttcgcgccaagaaggcagaggagctggatcttcagtcgacagaaatcactggggaggaggagctgggttcccgggaggactcgcccatgtcaccctcagacacccaagaccagaaacggaccctgaggccgccaagtagacacggccactcggtggttgctcccggcaggactgcagtgagggcccggatgccagcgctgccccgaagggaaggcgtagataagcctggcttttccctggccacgcagccccgcccaggggcgcccccctcggcttcggcctctcctgcccaccacgcgtccacccagggcacctctcatcgtccttccctgcctgccagcttgaatgacaacgacttggtggactcagacgaagatgagcgcgctgtgggctccctccaccccaagggcgccttcgcccagccccggccagccctgtcccccagccgccagtccccgtccagcgttctccgcgacagaagctctgtgcaccccggcgcaaagccagcctcgccggcccggaggaccccccattcaggggccgcagaggaagattccagtgcctcagccccaccctcaagactttctccaccccatgggggatcatctcggctgctgcccacccagccacacctgagctctccactttccaagggcgggaaggatggtgaggacgccccagccaccaactccaatgcgccatcacggtccaccatgtcctcctccgtctcttctcatctctcgtccaggacgcaggtctctgagggagcggaggcttctgatggtgaaagccacggtgacggcgatagggaagacggcggaaggcaggcggaggccacggcccagacgctgcgggcccggcctgcctctggacacttccatttgctcagacacaaaccctttgctgccaacgggaggtctccaagcaggttcagcattgggcggggacctcggctgcagccctccagctccccacagtcgactgtgccctcccgagcccaccccagggttccctctcactctgattcccaccctaagcttagctcaggtatccatggagacgaggaggatgagaagccgcttcctgccaccgttgtcaatgaccacgtgccttcctcctccaggcagcccatctcccggggctgggaggacttaaggagaagcccgcagagaggggccagcctgcatcggaaggaacccatcccagagaaccccaaatccacaggggcagatacacatcctcagggcaagtactcctccctggcctccaaggctcaggatgttcaacagagcacagacgcggacacggagggtcattctcccaaagcacagccagggtccacagaccgccacgcgtcccctgctcgtccgcccgcagcacggtcacagcagcatcccagtgttcccagaaggatgacacccggccgggccccacaacagcagccccctcctcccgtcgccacgtcccagcaccacccgggaccccagagcagagacgcgggtcggtcaccttcccagcccaggctctcactgacccaggccgggcggccccgccccacgtcgcagggccgctcccactcctcctcggacccttacacggcgagctccagagggatgctccccacggccctccagaaccaggacgaggatgcccagggcagctacgacgacgacagcacagaagtcgaggcccaggatgtgcgggcccccgcgcacgccgcgcgcgccaaggaggcagctgcgtcccttcccaagcaccagcaggggcggcaaagacgccgatgggagcctcgccaaggaagagagggagcctgccatcgcgcttgcccctcgcggagggagcctggctcctgtgaagcgacctctccccccacctccaggcagctcccccagggcctcccacgtcccttcccgactgccgcctcgcagcgctgccaccgtgagccccgtcgcgggcacccacccctggccgcagtacaccacgcgcgccccacctggccacttctccaccaccccgatgctgtccttgcgccagaggatgatgcatgccagattccgtaaccctctctcccgacagcctgccagaccctcttacagacaaggttataatggcagaccaaatgtagaagggaaagtccttcctggtagtaatggaaaaccgaatggacagagaattatcaatggccctcaaggaacaaagtgggttgtggaccttgatcgtgggttagtattgaatgcagaaggaaggtacctccaagattcacatggaaatcctcttcggattaaactaggaggagatggtcgaaccattgtagatctggaagggacccccgtggtgagtcctgacggcctcccactctttgggcaggggcgacatggcacacctctggccaatgcccaagataagccaattttgagtcttggaggaaagccgctggtgggcttggaggtcatcaaaaaaaccacccatccccctaccactaccatgcagcccaccactactacgacgcccctgcctaccactacaaccccgaggcccaccactgccaccacccgccgcacgaccaccacccgccgcacgaccaccaggcgtccaacaaccacagtccgaaccactacgcggacaaccaccaccaccacccccacacccaccactcccatccccacctgtccccctgggaccttggaacggcacgacgatgatggcaacctgataatgagctccaatgggatcccagagtgctacgctgaagaagatgagttctcaggcttggagactgacactgcagtacctacggaagaggcctacgttatatatgatgaagattatgaatttgagacgtcaaggccaccaaccaccactgagccttcgaccactgctaccacaccgagggtgatcccagaggaaggcgccatcagttcctttcctgaagaagaatttgatctggctggaaggaaacgatttgttgctccttacgtgacgtacctaaataaagacccatcagccccgtgctctctgactgatgcactggatcacttccaagtggacagcctggatgaaatcatccccaatgacctgaagaagagtgacctgcctccccagcatgctccccgcaacatcaccgtggtggccgtggaaggttgccactcatttgtcattgtggactgggacaaagccaccccaggagatgtggtcacaggttacttggtttacagtgcatcctatgaagacttcatcaggaacaagtggtccactcaagcttcatcagtaactcacttgcccattgagaacctaaagcccaacacgaggtattattttaaagtgcaagcacaaaatcctcatggctacggacctatcagcccttcggtctcatttgtcaccgaatcagataatcctctgcttgttgtgaggcccccaggcggtgagcctatctggatcccattcgctttcaaacatgatcccagctacacggactgccatggacggcaatatgtgaagcgcacgtggtatcgaaagttcgtgggagttgttctttgtaattcactgaggtataaaatctacctcagtgacaacctgaaagatacattctacagcattggagacagctggggaagaggtgaagaccattgccaatttgtggattcacaccttgatggaagaacagggcctcagtcctatgtagaagccctccctactattcaaggctactatcgccagtatcgtcaggagcctgtcaggtttgggaacatcggcttcggaaccccctactactatgtgggctggtacgagtgtggggtctccatccctggaaagtggtaatcacaggaccgtcatgctgcaagcttgccctgcccagccccaccaactaagtcgcactaggggctgtgagcaaagacagccagcgtgctcagccccgctgccctaggtgccaggaaggtcatagatggacactggccattctggtcatctcagtctggaactcagtcccacttcttggcctggacaatgaacaggattcagttttgctgttaactttgcttctctacttttttttgtttgtttgtaatagcacatcccagagacatcagaaaccagcaactgattcagtgtgatttccagactttttaggcatgaaattcggacacttcagtatttccaggaatagcatatgcacgctgttcttgcttcatggaatgctacatgctttctgtttttctcattttggatttctccaaaactaactgaatttaagcttcaggtccctttgtatgcagtagaaaggaattattaaaaacaccaccaaagaaaataaatatatcctacttgaaatttactctatggacttacccactgctagaataaatgtatcaaatcttatttgtaaattctcaattttgatatatatatgtatatatgcatatacatatccacacttgtctgcaagaatattgattaaaattgctaaatttgtacttgttcaccaga

SEQ ID NO: 57189 - DNA, 2484 bp, Homo Sapiens
cgctggcgcggctgcggccgctgctgcctacgcgccatggagcatcgcatcgtggggcccgggccgtaccgagctaccaggctgtggaatgagaccgtggagctttttcgtgctaagatgccgttacggaaacatcgctgtcgtttcaagagctatgagcattgtttcacagcggccgaagctgtggattggctgcatgagctgctgaggtgcagtcaaaacttcggccctgaagtgacccgcaaacaaacggtccagctgctaaaaaaattcctgaagaatcacgttattgaagacatcaagggaaaatggggtgaggaagattttgaagacaatcgtcacttatacagatttcctccttcttcacccctgaaaccatatccaaagaagcccccaaaccaaaaggatgttattaaatttccagaatggaatgatctcccaccaggcacttcacaagagaacatcccagtgaggccagttgtgatgaattctgagatgtggtacaagcgtcacagtattgcaattggagaggtgccagcttgccgtcttgtccaccgcagacagctgacagaggccaatgtagaagagatatggaagtctatgacattatcatacttacagaaaattcttggcctggattccttagaagaagttttagacgtcaaacttgtcaattcgaagttcatcatccataatgtatatagtgttagcaagcagggagttgttattcttgatgacaagtcaaaagaacttcctcattgggtgctgtcagctatgaagtgtttggcaaattggcccaactgttctgatttgaagcagcctatgtacttgggatttgaaaaagatgtctttaaaaccatagctgattactatggtcacttgaaagagcctctacttacatttcatctttttgatgcttttgtcagtgtactgggtttgttacagaaggagaaagtggcagttgaagcatttcagatttgctgccttctcctacctcctgaaaataggagaaagttacagctattgatgatgatgatggcaaggatttgcttaaacaaagagatgccacccctgtgtgatggctttggtacccgaacactgatggttcagacattttcccgttgcatcttgtgttccaaggatgaagtggacttggatgagttattagctgctagattggtaacgtttctgatggacaattaccaggaaattctgaaactccctttggccttgcagacctctatagaggagcgtgtggctcatctacgaagagtccagataaaatacccaggagctgatatggatatcactttatctgctccatcattttgccgtcaaattagtccagaggaatttgaatatcaaagatcatatggctctcaggaacctctggcagccttgttggaggaagtcataacagatgccaaactctccaacaaagagaaaaagaagaaactgaagcagtttcagaaatcctatcctgaagtctatcaagaacgatttcctacaccagaaagtgcagcacttctgtttcctgaaaaacccaaaccgaaaccacagctgctaatgtgggcactaaagaagcctttccaaccatttcaaagaactagaagttttcgaatgtaataatacttccacagcaacaggtgctagagaccactgttgttgttttgagtgaatggtggttaggagaaagactttggtggtggaagaaagaaaagcataaaacaaagactactgaaatatagataaagattgccttagtttttaaaaatgtttggccattagtatttttataaaactcaatgctagttttaaagtgtataaattggttaaaatttatgagtcaaatatatagtgataatgttaacatgtttgtaattgctacagaatttaagggtatttttatctctgtgctttctttttcatggtgtttattaaataattgtgtatatacatcctagctactgatatctttattatagccttaagacttaattttaagtcttaaaaatagtgtgtatacttgaataagaaagacactgggtactgttactgtgatgctattgacttagtagccaattatcatttctcctgtataaattccagtttttattgctgcacataaattttttaatgtcttatattgtgatagctatgtcttttattgcagatttattggatgttatgacagattttactaaagctagtgtttttataacatatatattagttgatgtttacctataagtggagtagattttcatctgcctgcaatggtataatttcagtcttagctaaaaatggaaagttgaactggataaattctttgggtacccttagacctctgattctaagtcaaatgcaaatgggttaaataaaatgagactacttcctttataaatatattttcatccttttgaaagtaagtgaaatgtaaataaacttattttttttaaaaatgccaaaaaaaaaaaaaaaaaa

SEQ ID NO: 57190 - DNA, 8028 bp, Homo Sapiens
tgctgccgccgccgcagccgcagctactgtgacttctccgattgtgtgagctttgttggagcctgcgtacgtggatttatcgctgccacggtctgcgtagctccagaggtttaaccataggatagagaaaccaggaatgtaatgaggaaatcaaaatggatccaagtatgggtgtgaattctgttaccatttctgttgagggtatgacttgcaattcctgtgtttggaccattgagcagcagattggaaaagtgaatggtgtgcatcacattaaggtatcactggaagaaaaaaatgcaactattatttatgaccctaaactacagactccaaagaccctacaggaagctattgatgacatgggctttgatgctgttatccataatcctgaccctctccctgttttaactgacaccttgtttctgactgttacggcgtcactgactttgccatgggaccatatccaaagcacattgctgaagaccaagggtgtgacagacattaaaatttaccctcagaaaagaactgtagcagtgacaataatcccttctatagtgaatgccaatcagataaaagagctggttccagaactcagtttagatactgggacactggagaaaaagtcaggagcttgtgaagatcatagtatggctcaagctggtgaagtcgtgctgaagatgaaagtggaagggatgacctgccattcatgtactagcactattgaaggaaaaattgggaaactgcaaggtgttcagcgaattaaagtctccctggacaatcaagaagctactattgtttatcaacctcatcttatctcagtagaggaaatgaaaaagcagattgaagctatgggctttccagcatttgtcaaaaagcagcccaagtacctcaaattgggagctattgatgtagaacgtctaaagaacacaccagttaaatcctcagaagggtcacagcaaaggagtccatcatataccaatgattcaacagccactttcatcattgatggcatgcattgtaaatcatgtgtgtcaaatattgaaagtactttatctgcactccaatatgtaagcagcatagtagtttctttagagaataggtctgccattgtgaagtataatgcaagctcagtcactccagaatccctgagaaaagcaatagaggctgtatcaccggggctatatagagttagtatcacaagtgaagttgagagtacctcaaactctccctccagctcatctcttcagaagattcctttgaatgtagttagccagcctctgacacaagaaactgtgataaacattgatggcatgacttgtaattcctgtgtgcagtctattgagggtgtcatatcaaaaaagccaggtgtaaaatccatacgagtctcccttgcaaatagcaatgggactgttgagtatgatcctctactaacctctccagaaacgttgagaggagcaatagaagacatgggatttgatgctaccttgtcagacacgaatgagccgttggtagtaatagctcagccttcatcggaaatgccgcttttgacttcaactaatgaattttatactaaagggatgacaccagttcaagacaaggaggaaggaaagaattcatctaagtgttacatacaggtcactggcatgacttgcgcttcctgtgtagcaaacattgaacggaatttaaggcgggaagaaggaatatattctatacttgtggccctgatggctggcaaggcagaagtaaggtataatcctgctgttatacaacccccaatgatagcagagttcatccgagaacttggatttggagccactgtgatagaaaatgctgatgaaggagatggtgttttggaacttgttgtgaggggaatgacgtgtgcctcctgcgtacataaaatagagtctagtctcacaaaacacagagggatcctatactgctccgtggccctggcaaccaacaaagcacatattaaatatgacccagaaattattggtcctagagatattatccatacaattgaaagcttaggttttgaagcttctttggtcaagaaggatcggtcagcaagtcacttagatcataaacgagaaataagacaatggagacggtcttttcttgtgagtctgtttttctgtattcctgtaatggggctgatgatatatatgatggttatggaccaccactttgcaactcttcaccataatcaaaacatgagtaaagaagaaatgatcaaccttcattcttctatgttcctggagcgccagattcttccaggattgtctgttatgaatttgctgtcctttttattgtgtgtacctgtacagtttttcggaggctggtacttctacattcaggcttataaagcactgaagcataagacagcaaatatggacgtactgattgtgctggcaaccaccattgcatttgcctactctttgattattcttctagttgcaatgtatgagagagccaaagtgaaccctattactttctttgacacaccccctatgctgtttgtgtttattgcactaggccgatggctggaacatatagcaaagggcaaaacatcagaggctcttgcaaagttaatttcactacaagctacagaagcaactattgtaactcttgattctgataatatcctcctcagtgaagaacaagtggatgtggaacttgtacaacgtggagatatcattaaagtagttccaggaggcaaatttccagtggatggtcgtgttattgaaggacattctatggtagatgagtccctcatcacaggggaggcaatgcctgtggctaagaaacctggcagcacagtgattgctggttccattaaccagaacgggtcactgcttatctgcgcaacacatgttggagcagacacaaccctttctcaaattgtcaaacttgtggaagaggcacaaacatcaaaggctcctatccagcagtttgcagacaaactcagtggctattttgttccttttattgtttttgtttccattgccaccctcttggtatggattgtaattggatttctgaattttgaaattgtggaaacctactttcctggctacaatagaagtatctcccgaacagaaacgataatacgatttgctttccaagcctctatcacagttctgtgtattgcatgtccctgttcactgggactggccactccaactgctgtgatggtgggtacaggagtaggtgctcaaaatggcatactaataaaaggtggagagccattggagatggctcataaggtaaaggtagtggtatttgataagactggaaccattactcacggaaccccagtggtgaatcaagtaaaggttctaactgaaagtaacagaatatcacaccataaaatcttggccattgtgggaactgctgaaagtaacagtgaacaccctctaggaacagccataaccaaatattgcaaacaggagctggacactgaaaccttgggtacctgcatagatttccaggttgtgccaggctgtggtattagctgtaaagtcaccaatattgaaggcttgctacataagaataactggaatatagaggacaataatattaaaaatgcatccctggttcaaattgatgccagtaatgaacagtcatcaacttcgtcttccatgattattgatgcccagatctcaaatgctcttaatgctcagcagtataaagtcctcattggtaaccgggagtggatgattagaaatggtcttgtcattaataacgatgtaaatgatttcatgactgaacatgagagaaaaggtcggactgctgtattagtagcagttgatgatgagctgtgtggcttgatagccattgcagacacagtgaagcctgaagcagaactggctatccatattctgaaatctatgggcttagaagtagttctgatgactggagacaacagtaaaacagctagatctattgcttctcaggttggcattactaaggtgtttgctgaagttctaccttctcacaaggttgctaaagtgaagcaacttcaagaggaggggaaacgggtagcaatggtgggagatggaatcaatgactccccagctctggcaatggctaatgtgggaattgctattggcacaggcacagatgtagccattgaagcagctgatgtggttttgataaggaatgatcttctggatgtagtggcaagtattgacttatcaagaaagacagtcaagaggattcggataaattttgtctttgctctaatttataatctggttggaattcccatagctgctggagtttttatgcccattggtttggttttgcagccctggatgggatctgcagcaatggctgcttcatctgtttctgtagtactttcttctctcttccttaaactttacaggaaaccaacttacgagagttatgaactgcctgcccggagccagataggacagaagagtccttcagaaatcagcgttcatgttggaatagatgatacctcaaggaattctcctaaactgggtttgctggaccggattgttaattatagcagagcctctataaactcactactgtctgataaacgctccctaaacagtgttgttaccagtgaacctgacaagcactcactcctggtgggagacttcagggaagatgatgacactgcattataaaaggccatggagagtgctgccagtttaacttgtcatgcactgacacagcattcatgatgttaccttcacttttcaaaatattgtagaaggatttttctcatgctcttatattagggattctatttgagttgcgtttatctgttggcaaaaatatctttttcaaggcatcagctctgaacctagctttatttaaactgaatttccagtatatttttgttttcactaacaacagataaggtagagcagtgaggtttacaacaagccctacaattagagattgctgaactgctgctaaagtgattttttttttatttgaccaaaaaaaaaaaggcccaagaagaagaaaatgaaaaatttgaagatttgagagcatgaagatattcatgcttttgaactcaaaatattgaagatactctcaagcctgtatccctgcccactggggagcaatgactttcaaagcactgtgtataaaacatctagttttagaagggaaacagttgaaactgtttaaaaatagatgtgccttatttattgcaggctttctttcccccattctccctgcatccttgtccttgcaggtgcttttttagatgctccaatatgtcttcttttgttattttctttcgagctaaccagtttagggtggtttttcattgattaaaaataactgacaactgttctaatattttgctcctttttaaattttgtagctcaaaagaccttaaaggtctgtagggttccctgcctcccatctttccactgttgtaaaaagtatatcaaattattccttcaagtttcctagctctgtgctcagtttcagttcactcctgccaagttggactctaagttattcttcatgtagtctgctgatctcagtctggaaacttaacattatgagccttttctgctcaaaaaattttcaaagattaaaactattatacatatacaggtcatataaaattacctggattcactaaatttgtttgttgttgttgttgttgttgttgttgttgttgagacagagtcttgttttgcagcccaggctggagtgcagtggcaccatcttggctcactgcaacctctgcctaccggattcaaggaattctccctgcctcagcctcctgagtagctaggattacaggtgcctgccaccacacccggctaattttcatatttttcagtagagacggggtttcgccatgttggctagcctggtcttaaactcctaacctcaggtgatccacccgccttggcctcccaaagtgctgggattacaggtgtgagcctccatgcccagcctaaatttgtattttttgaattgagtataacactttgctagtatatataatttaatagattttatttatcttttagtgtttcagataacctctcaaaaagactttaaaataatgctattacacaaagctgcatttaccaaaaaatacagtaaaatcataatacagaaactaaaatttccctaggttatgacgctttttagctaaatatatactcttctctagtttaaaacatttgaacttgcctagttagtgtggttggcaaatttaggagcttgttcccattgccaaatggatttagaaattcccttgtgagtgcctggtagctaatacactggtcagagatctggtacttgtaagactatttaaatttctttgttagttgcaagatggatttcatatgcagaatatgtaaatgaagaggactcataagtaaattcctaacattttgttcccattaccagaagcaaagctgctgctaacccaacatctggcacataggatttgtactcggtaaatgttagttcttttctccccttgaggtcagtaataaatacaaaaaaatcatttttctagagcagagtcttaaaatcaggtgggggtaggggatggagttcttcctttcctaccccttttctcttttatcctttcatatatacacatgcaaagtttacaaccttattccatgctgtctttcagatttagaaaagatctaatttctgtctcagctgtcttaaagagagaactgaagcttttgatgaaggtgctattaatctagaaaggcaaacccatttcactgaaatatcaatgggtttgcatatctaggccctttttttagaccaatgcctatgccatcctccatgctttcagtttgagttttattatttattattttaattccagtggcccatcttataatacaacttgtttcttctagaagacagagctgatagggtaaatgttgaaaaaagaagcatgcctccttctccctcccacccacctcaagcagttgaacacagccagttattcttccattattatgtgtaccttggagtcatcctcttggtcttgtattcatattgtgggacagtgggaatagcagcttgtagtattgaaataatcaaagagataatttcagctcttacaacaagaacagaaaacatgctaattagaaaaagtcctgctttaagtaatatgtagccacatttgaatcctctaccacaagtcttttttgcaatcttgaactttcattagcttcaaagagaagctgtatttacaggagaaagaggtgattatggagggaatcaaaaatactgctttcagttagtagctagctttaagtcaggagttagtaatgagaaattttataaatgtgtatttctgtgtattcacatacatatatatatacacacatatatatgtacatacacatacatacatattaccatactgaagggaaatggatttatatttgaatttgatatttgaatatttgaagttctctatttatatttcatttatcactcttctgtattcactcagcaaccatgcccttagtctgaagataacaaggatactttaatatccagtgccggttcagactcacctatgtggcaccttaaacttaaatatccaaagatgccttttgaatttcaaagattaaaacacagctagagtagtagtattgtagtctcaagatgtatggtgtgtcatttgtgaaaatagaaacgttatttttcctagtttagtatcaacattttagaatgtcaaatttgatgccttgtgaacaagtaattttatattgtgctttaattttttaaaaagtattctttattcatatgtatagaatgcttaaaatagcactgtagacaagatgtttccaaaactttaagtgcgcatatcttttctgtatacagcttaaaatcaaaaatgtatgttaagagaattttttctattacttatggatcatgctttaaaatgatttttcttgatatttattttactccattttgtttttttctctgggtgaggcatctggttactggttattttaaaaagaataaagacattcctgg

SEQ ID NO: 57191 - DNA, 2051 bp, Homo Sapiens
cgccactttgctggagcattcactaggcgaggcgctccatcggactcactagccgcactcatgaatcggcaccatctgcaggatcactttctggaaatagacaagaagaactgctgtgtgttccgagatgacttcattgccaaggtgttgccgccggtgttggggctggagtttatctttgggcttctgggcaatggccttgccctgtggattttctgtttccacctcaagtcctggaaatccagccggattttcctgttcaacctggcagtagctgactttctactgatcatctgcctgccgttcgtgatggactactatgtgcggcgttcagactggaactttggggacatcccttgccggctggtgctcttcatgtttgccatgaaccgccagggcagcatcatcttcctcacggtggtggcggtagacaggtatttccgggtggtccatccccaccacgccctgaacaagatctccaattggacagcagccatcatctcttgccttctgtggggcatcactgttggcctaacagtccacctcctgaagaagaagttgctgatccagaatggccctgcaaatgtgtgcatcagcttcagcatctgccataccttccggtggcacgaagctatgttcctcctggagttcctcctgcccctgggcatcatcctgttctgctcagccagaattatctggagcctgcggcagagacaaatggaccggcatgccaagatcaagagagccatcaccttcatcatggtggtggccatcgtctttgtcatctgcttccttcccagcgtggttgtgcggatccgcatcttctggctcctgcacacttcgggcacgcagaattgtgaagtgtaccgctcggtggacctggcgttctttatcactctcagcttcacctacatgaacagcatgctggaccccgtggtgtactacttctccagcccatcctttcccaacttcttctccactttgatcaaccgctgcctccagaggaagatgacaggtgagccagataataaccgcagcacgagcgtcgagctcacaggggaccccaacaaaaccagaggcgctccagaggcgttaatggccaactccggtgagccatggagcccctcttatctgggcccaacctcaaataaccattccaagaagggacattgtcaccaagaaccagcatctctggagaaacagttgggctgttgcatcgagtaatgtcactggactcggcctaaggtttcctggaacttccagattcagagaatctgatttagggaaactgtggcagatgagtgggagactggttgcaaggtgtgaccacaggaatcctggaggaacagagagtaaagcttctaggcatctgaaacttgcttcatctctgacgctcgcaggactgaagatgggcaaattgtaggcgtttctgctgagcagagttggagccagagatctacttgtgacttgttggccttcttcccacatctgcctcagactggggggggctcagctcctcgggtgatatctagcctgcttgtgagctctagcagggataaggagagctgagattggagggaattgtgttgctcctggaggaagcccaggcatcattaaacaagccagtaggtcacctggcttccgtggaccaattcatctttcagacaagctttagagaaatggactcagggaagagactcacatgctttggttagtatctgtgtttccggtgggtgtaataggggattagccccagaagggactgagctaaacagtgttattatgggaaaggaaatggcattgctgctttcaaccagcgactaatgcaatccattcctctcttgtttatagtaatctaagggttgagcagttaaaacggcttcaggatagaaagctgtttcccacctgtttcgttttaccattaaaagggaaacgtgcctctgccccacgggtagagggggtgcacgttcctcctggttccttcgcttgtgtttctgtacttaccaaaaatctaccacttcaataaattttgataggagacaaaaaaaaaa

SEQ ID NO: 57192 - DNA, 3487 bp, Homo Sapiens
gagaactggacgatcgcctggcttagaagttttcctccctccccgaaccccgttttctcttccatttcttccggtcgcgtgtccccagcgcccacaggtggaaatcaaccgcccgcggggttgcggggcacaaagaggcagctggcggctccgctgaccccttcccgccggcctggacgaagtctgggcttgggagccgcgtgatgcatcccaaagaaggcgcagaacagcacgtgttctccccggtgcccggggctcccacaccaccgcccaatcgctgcggccgcctagtgctcgggccgcgcctgccagccgcggggactccgggcccgggtattcgcgccgccgccgcccgccatgcgcttccgctttggggtggtggtgccacccgccgtggccggcgcccggccggagctgctggtggtggggtcgcggcccgagctggggcgttgggagccgcgcggtgccgtccgcctgaggccggccggcaccgcggcgggcgacggggccctggcgctgcaggagccgggcctgtggctcggggaggtggagctggcggccgaggaggcggcgcaggacggggcggagccgggccgcgtggacacgttctggtacaagttcctgaagcgggagccgggaggagagctctcctgggaaggcaatggacctcatcatgaccgttgctgtacttacaatgaaaacaacttggtggatggtgtgtattgtctcccaataggacactggattgaggccactggacacaccaatgaaatgaagcacacaacagacttctattttaatattgcaggccaccaagccatgcattattcaagaattctaccaaatatctggctgggtagctgccctcgtcaggtggaacatgtaaccatcaaactgaagcatgaattggggattacagctgtaatgaatttccagactgaatgggatattgtacagaattcctcaggctgtaaccgctacccagagcccatgactccagacactatgattaaactatatagggaagaaggcttggcctacatctggatgccaacaccagatatgagcaccgaaggccgagtacagatgctgccccaggcggtgtgcctgctgcatgcgctgctggagaagggacacatcgtgtacgtgcactgcaacgctggggtgggccgctccaccgcggctgtctgcggctggctccagtatgtgatgggctggaatctgaggaaggtgcagtatttcctcatggccaagaggccggctgtctacattgacgaagaggccttggcccgggcacaagaagattttttccagaaatttgggaaggttcgttcttctgtgtgtagcctgtagctggtcagcctgcttctgccccctcctgatttccctaaggagcctgggatgatgttggtcaaatgacctagaaacaaggattctacctgaactgaaaggactgtgtgacctcccccaagccaaccactttcacctgggatgactttcgattatgctttgttttggggctgtatttttgaaatactctacaagaaagctgtggctcaacacatgagaagaagcacgaagcagttaggcttgtacatcagacagaagggtaatgcgtgcagttcctgctgcctgcaggcagacgaggcctttgctttacagcactgtatgtgttgcacgatggatccgtgacagcactttcctgttgcactgaaactcttggccatgtagaggaaaagatatggagttatgtggatttcatcactagtatgtgtgccgtgagctggtcaagttgccaaaggaggaaataaggttagaagcctgaaccgtacaaaagaagagctcactatggtcaaaaagtgatggctttcaggacttgttttttatcctgcctcacagttgttaaagtctgttccaaggcatcaccttccttctctacccaacaaccctgtgtaacaactaaagtagaattatctctcatttgttgttgtttttcctcaaaattaccaaacaaagcaaaaaatacccttgttttttatagttgagatgtcaagaagttaaattgaggcttaatgagcataggtagcttgtccaaggtctcatgaccagtcaagggcaagctggagttaataatctatatttatttgactcagcactgttttcatcacaacttgttttcccagcatcatgtagtgcatttagttttgtctttctcagggtatagtcaatatgcctgcaggagtttctatagcgagacatagaatagtattctgatcagttgccaaagaatctaggaaattagttgtattttgtgcaagctaatttaaaaacatgatgggctgttttaagaccagagtggaaattcatgagaggaactatactaccaaaagagcccaaatgaccaaatccatggataattgcttcacagccttggccatcctggctcagctctcaatttagtataatatgcagttcctgtgcctccagactatgcagctcatcaccctaggttctacaggaaatacagagatgaacaactttgccttcaaaaatgtgctgcctagaaacagacctgcattcaaccaactgtaatgcaggattggaccatgaatgatatgctagaatagaagaaagagaagtgtttttttaattgagagcctctatgtgcaaggtgatatataatcatatccagtttaatcttcacaatatccaatgaagaaggtctcattatctccatgataaagatggggaaactaaggtcagaagggttaactcaactgtctattgtcacatgatgaataaatagatgaagtgagatacaaagctgggtttgattcaaagcccttactttcctaattaaactatgatgcgtatttatttttctgcaccttcctttcttccacaaacacatattgatagatgcaagagactcttatttagaaggcgtgggggacaagaaggatacaaggtaagtttcagtggagctcagaggacggggagatagaactgtggcacttaggggagatgacatttgctttgggcagaggcagctagccaggacacatttccactataattttacaaagttaaatttataagctagcattaagtaaagtgaagtccagctcccttgctaaaaataactagaggtaataattggtattcaggtaactcatttacagtcataatgtgttgtgaaaatttaatcttaaaaattaaatttttaaactatgtgggtctgtgaatttctttaatgtctaagaaatccagcttcataatttccatgatacaaagatcttttttcaggtggatttttacctttgttccttttgctctgatagacaaaatcagtttaggactattaaagaatgttttggaataaactgtctttttcctcaatgaatgggatgtctaatgtatttcaaaatcacccaaaacttttggcaaataaaagcatttaaaaagacaaaaaaaaagaaaaaaaaaa

SEQ ID NO: 57193 - DNA, 4242 bp, Homo Sapiens; identical to SEQ ID NO: 31506

SEQ ID NO: 57194 - DNA, 2907 bp, Homo Sapiens
gcgtccggcgccgagattcaaactagtggcgggaggctgtgagctgagcggtggggtctgcgtacgcctggagtccttccccgctgtgctcagcatggaccctatccggagcttctgcgggaagctgcggtctctggccagcacgctggactgcgagacggcccggctgcagcgagcgctggacggagaggaaagcgactttgaagattatccaatgagaattttatatgaccttcattcagaagttcagactctaaaggatgatgttaatattcttcttgataaagcaagattggaaaatcaagaaggcattgatttcataaaggcaacaaaagtactaatggaaaaaaattcaatggatattatgaaaataagagagtatttccagaagtatggatatagtccacgtgtcaagaaaaattcagtacacgagcaagaagccattaactctgacccagagttgtctaattgtgaaaattttcagaagactgatgtgaaagatgatctgtctgatcctcctgttgcaagcagttgtatttctgagaagtctccacgtagtccacaactttcagattttggacttgagcggtacatcgtatcccaagttctaccaaaccctccacaggcagtgaacaactataaggaagagcccgtaattgtaaccccacctaccaaacaatcactagtaaaagtactaaaaactccaaaatgtgcactaaaaatggatgattttgagtgtgtaactcctaaattagaacactttggtatctctgaatatactatgtgtttaaatgaagattacacaatgggacttaaaaatgcgaggaataataaaagtgaggaggccatagatacagaatccaggctcaatgataatgtttttgccactcccagccccatcatccagcagttggaaaaaagtgatgccgaatataccaactctcctttggtacctacattctgtactcctggtttgaaaattccatctacaaagaacagcatagctttggtatccacaaattacccattatcaaaaacaaatagttcatcaaatgatttggaagttgaagatcgtacttcgttggttttaaattcagacacatgctttgagaatttaacagatccctcttcacctacgatttcttcttatgagaatctgctcagaacacctacacctccagaagtaactaaaattccagaagatattctccagcttttatcaaaatacaactcaaacctagctactccaatagcaattaaagcagtgccacccagtaaaaggttccttaaacatggacagaacatccgagatgtcagcaacaaagaaaactgaaattccagtggatctatccaacacagaaactgaacaaaatgagatgaaagccgagctggaccgattttaacattcacattgccctgcctctgtccccctttaaacgttgacccattttaaagacaaacatgaacattaacatcataatatgctttttatgaagtttcaataaggtttaaccttagtcttgttgacatgtagcccagtcattcactctttaaggattattagtgtttcattgatactaaattacccagcttaatcaacagaatggtttaagtagtaccaggaagtaggacaagtaatttcaaaaatataaaggtgtttgctactcagatgaggccgcccctgaccttctggccagagagacattgctgccagccagctctgccttcccatcatctcctttcaggaccgtcccacaccttttacttgctcagtgctgtctgaagatgcagttgctgtttgcaaacaacaggaacaccagttaaactaattaggaaaagagggagatttccaggcctgggtaactatatactgtgaccattggaggtagagacaggtctcaacagttggaaccaggaactctgctgtcaggttgagagttttgtttctcttccagcttttcactgtgtgggggtcttttctcttatgtcagctctttctatcacatggcagctgacctctcacgctccactctgcagcttggacacccagtagaccctgaatttcactctctctaaaaggttctgagggctcatcctgggccaggggccctcctgtgcactgttagctatggccacgggagcctccagagctgcctggtagcttcaggttgacctgcttatcaggcctacgatccttctgatttaagtacagctggaaagtattatctaattaagttcatgatagtgcttttggagaacttgtcaaattacagccaatgagaaaataaggacctagcatactgtggagaaccattaaaaatttgagaagaaacaacaagtattatgtcaacttacttcaaaggcgtagttttgggaatttgatgcagtaaagattaccctgttttatgattgttccttgaaagtcaaatgggggacctgtccattgtgctctattaatcttgtcagaaaactgtcaccaaaacaaaacttgagtttgtccttgttctaggagttactgggtagttgtaagtattatttttattaaatataatgtaaaataaaatgttaagatacttagttttgtttttcaaagtaaagctgtagtcagccttatgtatgccattgactctgaaatgtataccagcctttcactgtgtaccgtgtgtatataaatccacagaaccggatgagctgcttagggagggaatatattcaaagtgtaccaaggaccaaatcctggagttctcccaactttagaggatggaaaggggcagagtaatctagcaaaggagactgaggccagtgaagtaggaagaaagtatttcaaggagagtgatgattctgtgaatattgctgagaattcaaataaaaagaggactgagaactgaaaaaaaaaaaaaaaaaaaa

SEQ ID NO: 57195 - DNA, 5703 bp, Homo Sapiens
gcacatccctgcactagtggccgcaaccgagacgccgcgctccagcagctgctgccgcccagcccggccccgccgccgccccccagccctgcagccccgcagccccggccgcgcccagcccggcgaggacagcaccaggaggcggcccccagcgcggccacaaagacccccggcggcgtctctccgcggaccggtcctacttgaagtccatcatgtccttcggcagagacatggagctggagcacttcgacgagcgggataaggcgcagagatacagccgagggtcgcgggtgaacggcctgccgagcccgacgcacagcgcccactgcagcttctaccgcacccgcacgctgcagacgctcagctccgagaagaaggccaagaaagttcgtttctatcgaaacggagatcgatacttcaaagggattgtgtatgccatctccccagaccggttccgatcttttgaggccctgctggctgatttgacccgaactctgtcggataacgtgaatttgccccagggagtgagaacaatctacaccattgatgggctcaagaagatttccagcctggaccaactggtggaaggagagagttatgtatgtggctccatagagcccttcaagaaactggagtacaccaagaatgtgaaccccaactggtcggtgaacgtcaagaccacctcggcttctcgggcagtgtcttcactggccactgccaaaggaagcccttcagaggtgcgagagaataaggatttcattcggcccaagctggtcaccatcatcagaagtggcgtgaagccacggaaagctgtcaggattctgctgaacaagaaaacggctcattcctttgagcaggtcctcaccgatatcaccgatgccatcaagctggactcgggagtggtgaaacgcctgtacacgttggatgggaaacaggtgatgtgccttcaggacttttttggtgatgatgacatttttattgcatgtggaccggagaagttccgttaccaggatgatttcttgctagatgaaagtgaatgtcgagtggtaaagtccacttcttacaccaaaatagcttcatcatcccgcaggagcaccaccaagagcccaggaccgtccaggcgtagcaagtcccctgcctccaccagctcagttaatggaacccctggtagtcagctctctactccgcgctcaggcaagtcgccaagcccatcacccaccagcccaggaagcctgcggaagcagaggagctctcagcatggcggctcctctacgtcacttgcgtccaccaaagtctgcagctcgatggatgagaacgatggccctggagaagaagtgtcggaggaaggcttccagattccagctacaataacagaacgatataaagtcggaagaacaataggagatggaaattttgctgttgtcaaggaatgtgtagaaagatcgactgctagagagtatgctctgaaaattatcaagaaaagcaaatgtcgaggcaaagagcacatgatccagaatgaagtgtctattttaagaagagtgaagcatcccaatatcgttcttctgattgaggagatggatgtgccaactgaactgtatcttgtcatggaattagtaaaggggggagacctttttgatgccattacttccactaacaaatacaccgagagagacgccagtgggatgctgtacaacctagccagcgccatcaaatacctgcatagcctgaacatcgtccaccgtgatatcaagccagagaacctgctggtgtatgagcaccaagatggcagcaaatcactgaagctgggtgactttggactggccaccattgtagacggccccctgtacacagtctgtggcaccccaacatacgtggctccagaaatcattgcagagactggatacggcctcaaggtggacatctgggcagcaggtgtaatcacttatatcctgctgtgtggtttccctccattccgtggaagtggtgatgaccaggaggtgctttttgatcagattttgatggggcaggtggactttccttctccatactgggataatgtttccgattctgcaaaggagctcattaccatgatgctgttggtcgatgtagatcagcgattttctgctgttcaagtacttgagcatccctgggttaatgatgatggcctcccagaaaatgaacatcagctgtcagtagctggaaagataaagaagcatttcaacacaggccccaagccgaatagcacagcagctggagtttctgtcatagcactggaccacgggtttaccatcaagagatcagggtctttggactactaccagcaaccaggaatgtattggataagaccaccgctcttgataaggagaggcaggttttccgacgaagacgcaaccaggatgtgaggagccggtacaaggcgcagccagctcctcccgaactcaactcggaatcggaagactactccccaagctcctccgagactgttcgctcccctaactcgcccttttaataagacccttttactcaaagtcctagcttaaccctttgagactctgagatttttttcccccaaatttgtgtaaaacagtttcatctgatctatctagcgctcaatgcttgaatggcagaactgaaagtgttttcaggtatctttgtagcggtttccctttactgaataagatgacacgtggtgattgtgaagatggtaatttgctgctaatagagtcctcaaagggttaaggccaatttgcaatttttttttaaacttagaagcaatgaatgttttcatcagtcaagctaggatctgcagtatgtaatatagcacttgttaaccctctgagtgcatagaattttattgagaattcttgtttgggaatttttcaggcctttggatgtatacacacatgtttcttgattttactgcagatcaaggggtgttgttagatgctgaaatgtccagaaaagaaggacatttagaatgatatcttgtttgtccttttctgtgggtttagaacgtggcaggtttataacttcgacacacgcacggttctttcttcttcacaatcctattcagaaacagattttttttttcattagagatatgactgtcagttgcagtgagttctgcatcccaagtggagggaattgggtttgtggcaaagagcttgacccaggaaatagatggtgccccccaaattgtctccacatgaagatgtactgatgacgccccagaaatgctgcttccatatcagctgctgctagcgccagcgcagactctcagggagtcaccacagcttgtcttgtgcttggtgagtgagggtctctctactcagtgtcagacatctacaggaaagaaacaactggtggaaaagagcaataaattgcccggtgctctgcagggctggaatttcaaacagaaagagggaataagatcctgtgatttttctcacctgcttttccacgcactgtggtcatcactgtgcaatctacatctagtatgaaatccacacataggagagctggggcacaaggggactggaggcagttgctttgcaagatggctgaggagaaagcacactgggaacacaatccagaatgttctaacaataagttttcagtgaataaaccactggcaagacatttccatgtgcacctttaggttacctatatagtctcctaggaagatcaggatgaaagacctagatgatacccctgaggataaaacctccatcccctaaaatgattttttttaaataccactgtctttagctgtccaggaggtcagagtgttttttctgtctttgggccaagtcctgtctgagacctgtattttcactcttgttaccaaatctatctccctagtgcagtgtctccaggcctgagtttcttctggaacagattccattttagaatggggattcacaggttctgtgcatcaccacagtgctcagagaggattctcctggggtgtcttagaggcaggtgcccaactcaaatgtattcccaaggtttgctgggctctgggatccacgagacaaccagagagggatatctcatgaaatttgcatctggtggctgaacagtacctatgttctctgttttgaatatactttaatacctgagagtcttaaaatttgtgaacaacgtttctatagtcctttattttcaaatgcacattgatcttcacttgctgcatttttactcttcaaccctgaaactatggtctacattaatatggatttttaaatcacatgtcattacttttgcaacaccatcaccaaaattttttgctcttttacatttaggttcatctctgtggtctgtgttgtcctgacatgtaaaaagcatatcgtttattgaggtttttttcccccccttttagagcatccggaagtgataacacgcaaaatcacaaagtagcataaatcagtaaattagttgagttgtttttgggggggaggtgggggtagggggcacagaacaccagaaagagtgttggtgtgtaggtagattccatattaatgaggaacactgaactagttggaaattactgctttctctagaaatataaagcaaagcactattccaaggctatggagtagctctacagcctggcctcaactctaaaagtgtgaagaatgcaatgggcagagacctacctgcagtggactgtcattttcctttctttctctgaattactgctttttctgtgggcattaactatattgctacagcatctagtgtactgagcctgcggtgcatggctcaggccttttcccatcgacgtctagggggactctggaccgtgtgaagctagggggtgtttctcagcacactgcagaagggcagctcagaagaatgcagggcccattcagcatggggatcccagcacatcactgtagaatttgagtgatctatgctgaataaacagtggaatgtgaccagtcaagtagaaatcttgagtaatcagatggaatgcaatctttctaacattaagctaccaagatcctgaatgtcagagatgtactcagagggttaacagacaagcacaaggcatgctgactacattggtgtatccagattgctttgcttttagccagtgctttctaatttttttctcgacattcttgggatagttcaagtttgaaataattaagtggtggtgttctttaaggaatttctataaccaaattgatcttatttttgatttcacttatcatagaacaaatatgtatcattatggcagtgtatctatgtaattatcaatttaatcatcaccaccggtgtttccatattttttcccaagtatttaatatagctctcttatggtggtggcctggtgatggggaccgtctttcttttactgacacatgaccaatcatatggtattttcaagggaattttaagattcatcttttcagtttgatagtagactagttaaggaagaactctttcattacttgcatcgtgtaaatcatctctgtagacatgtgttcatattaatgaacacattttttctcaacattgtagcagaaatcattttattcgtcatgatcaatgaatatgtgatttgctccagatcgttagaaggaaaagtaagatttcagtcatcaaaaatgtttttaccgtagccctcatctaacttacacgtggtgcatattaaaataagcagagaaaaaaaaatgtgaataaactactgaaaac

SEQ ID NO: 57196 - DNA, 2498 bp, Homo Sapiens
accagcaccccgcccagagcagtgccgctgcccaaatcctcgcaggcagctcatcaacgcaattgcaactccggctggagccccggacctgcaagcctgggtgtccgtgggtccgtctgcccagccatctgctggtggcacctctccctcctgccgcctccctcggtgaaccccaccttgcagaagtgcagctcgcccggagcagcccaggagctcagcatgcgtcccccaggcttcaggaacttcttgctgctggcgtcctcccttctctttgctgggttgtcagctgttcctcaaagcttctcgccatctctgaggagctggccgggcgccgcctgcaggctgtcccgggccgagtcggagcgacgctgccgcgcacctgggcagcccccgggggccgcgctgtgccacggccggggccgctgcgactgcggcgtctgcatctgccacgtgactgagccgggcatgttcttcgggcccctgtgtgagtgccatgagtgggtgtgcgagacctacgacgggagcacctgtgcaggccatggtaagtgtgactgtggcaagtgcaagtgtgaccagggatggtatggggatgcttgccagtacccaactaactgtgacttgacaaagaagaaaagtaaccaaatgtgcaagaattcacaagacatcatctgctctaatgcaggtacatgtcactgtggcaggtgtaagtgtgataattcagatggaagtggacttgtgtatggtaaattttgtgagtgtgacgatagagaatgcatagacgatgaaacagaagaaatatgtggaggccatgggaagtgttactgtggaaactgctactgcaaggctggttggcatggagataaatgtgaattccagtgcgatatcaccccctgggaaagcaagcgaagatgcacgtctccagatggcaaaatctgcagtaacagagggacttgtgtatgtggtgaatgtacctgtcacgatgttgatccgactggggactggggagatattcatggggacacctgtgaatgtgatgagagggactgtagagctgtctatgaccgatattctgatgacttctgttcaggtcatggacagtgtaattgcggaagatgtgactgcaaagcaggctggtatgggaagaagtgtgagcacccacagtcctgcacgctgtcagctgaggagagcatcaggaagtgccagggaagctcggatctgccttgctctgggaggggtaaatgtgaatgtggcaaatgcacctgctatcctccaggagatcgccgggtgtatggcaagacttgtgagtgtgatgatcgccgctgtgaagacctcgatggtgtggtctgtggaggccacggcacatgttcctgtggtcgctgtgtttgtgagagaggatggtttggaaagctctgccaacatccgcggaagtgtaacatgacggaagaacaaagcaagaatctgtgtgaatcagcagatggcatattgtgctcggggaagggttcttgtcattgtgggaagtgcatttgttctgctgaagagtggtatatttctggggagttctgtgactgtgatgacagagactgcgacaaacatgatggtctcatttgtacagggaatggaatatgtagctgtggaaactgtgaatgctgggatggatggaatggaaatgcatgtgaaatctggcttggctcagaatatccttaacaattacatgagagaggtctggattcttattttttctgggccattagaacatataaatgcgaaggaaaccatgtatattcaccactaggacaggttaaaaagaccattgtatgtttttctatttctgaattacgaatgaaatccgagtacctattagaaatgagttatgcaaatttagatgcaaataacattagaaaaaaaagattcttccataattaacataagtggttcctaacgagagcaatttttccacccaaaagtcatttggcaacatctacagacaattttgattgtcacactgggtcgggtaggaaggtatgctgcagacatttggtgggtagaggccagggatgctgctgagcatcccgcagtgtacaggacagcccccaaacaaggaattatccagccccaaatgccaatagggctcagactgagaaacattgagttatatggctattagaaatccacattcttacacaagaaagaccatattagaatctaaggaaaacatgcatattcacattaattaatcgatcagatttttccagaattccgtatcagtcaccattttaatatggggacaatgaagacaagcacacaggaggtagaatatcagagtggggctggatcaagggcaaaaactggtcattaagtcatctgacattaaatcatttagccactaagttatttgtgtactctcactttaaactcaccaaagaagattctcttaaagaaattatgaaaaatgtacaatttaacattttaaataaatagtgacagaagttgtttaaaaa

SEQ ID NO: 57197 - DNA, 4234 bp, Homo Sapiens
gcccatgagcgcgccgcggcccgggctggcgtgcgggtgcggctgcggcggccgcgcggcggggccccgggaggcgggtcgctgagcggggcgcgcggccccgaggatgcgggagcgggagcgggagcagcgctggcgtcaatgctcccttcctcgggccattggagactccgttgctttttaatggcggcagcggctgctgggtgagcagctggaggccggacagtgttcgtcccatccggagaggatcgctttctcctggcgtcaccagcgctgggttggtgggggtagcttttccctctttgctcctccattcttgaagaaagaagaagatgccactgccatttgggttgaaactgaaacgcacccggcgctacacggtgtccagcaagagttgcctggttgcccggatccaactgcttaataacgagtttgtggagttcaccctgtccgtggagagcactggccaggaaagcctcgaggccgtggcccagaggctggagctgcgggaggtcacttacttcagcctctggtactacaacaagcaaaatcagcgccggtgggtagatttggaaaaacctttgaagaagcagctggataaatatgcattggaacctaccgtctattttggagtggtgttttatgtgccttcagtttctcagctgcagcaggagattaccaggtatcagtattatctgcaactgaagaaagatatcttggaaggaagtattccttgtaccttagaacaagcaattcagctagcaggcttagctgttcaagcggattttggtgactttgatcagtatgaatcccaggactttcttcagaaatttgccttgtttcctgtgggatggttacaagatgaaaaagtattggaagaagcaacccaaaaagtggccttactacatcagaaatacagagggctcacagctcctgatgctgaaatgctgtacatgcaggaggtagagagaatggatggctatggagaagagagctaccctgctaaggatagccaaggaagtgacatatccattggagcgtgtcttgaaggtatctttgtgaaacacaagaatggaaggcatcctgtggtatttaggtggcatgacattgccaacatgtcccacaacaagtccttttttgcattagagctggcaaataaagaggagaccattcaatttcaaactgaagacatggaaacagcaaaatacatttggagactctgtgttgcgcgacacaagttttacagactaaaccagtgtaacctgcaaactcagactgtcacagtgaacccaatcaggaggaggtcttcttcaaggatgtctctgcctaaaccccagccctacgtgatgcctcccccaccgcagttgcactataatggacattatacagaaccatatgcttcttcccaagataacctctttgtgcccaaccagaacggatactactgtcactctcagacaagcttggatagagcccagattgacttcaacggtcggatccgtaatggcagtgtctacagtgcacacagcaccaactccttaaataatcctcagccctacttgcagccctcgccgatgtcgtccaaccctagcatcaccgggagtgacgtcatgaggcctgactacctcccgtcccatcggcacagcgccgtgatacccccgtcctaccgccccaccccagactatgagactgtgatgaagcagctcaacaggggcctggtgcatgcggaacggcagagccactcgctgcgaaacctcaacatcggcagctcgtacgcctacagcaggcccgcggcgctggtctacagccagcccgagatccgcgagcacgcacagctcccctcgccagcggccgcacactgcccgttcagcctgagctacagcttccacagcccgtctccctacccctaccctgccgagcggcggcccgtggtgggcgcggtcagcgtgccggagctgaccaatgcgcagctgcaggcgcaggactacccgtctcccaacatcatgcggacgcaggtgtaccggccacccccaccctacccgccccccaggcccgccaacagcacgccagacctgtcccgccacctttacatcagcagcagcaaccccgacctcatcacgcggcgcgtgcaccactcggtgcaaacgttccaggaggacagcctgcccgtggcgcactcgctgcaggaggtcagcgagcccctcaccgccgcgcgccacgcgcagctgcacaaacggaacagcatcgaggtggccgggctcagccacggcctggagggcctgcggctcaaggagcgcaccctatccgcgtcggcggcagaggtggcgccgcgagccgtctcggtgggctcccagcccagcgttttcaccgagaggacacagcgagaagggccggaggaggcggagggcttgaggtacggccataagaagtccctgtcggacgccaccatgctaatccacagcagcgaggaggaggaggacgaggacttcgaggaggagagcggggcccgggcgccccctgcacgtgcgcgcgagcctcggcccggcctggcccaggacccacctggctgccctcgcgtcctgctcgccgggcccctgcacatcctggagcccaaggcccacgtcccagacgcggagaagaggatgatggacagcagccccgtccgcacgaccgcagaggcccagcggccctggagagacgggctgctgatgccctccatgtcggagtccgacctcaccacgtcaggccgctaccgagcccggagggactctctgaagaaaaggccggtgtcggaccttctctctgggaagaagaacatcgtggaagggctcccgcctctagggggaatgaaaaagactcgagtagatgcaaaaaaaattggtcctcttaaactggctgccctaaatggactctccctatctcgagtgcctctgcctgatgaaggaaaggaagtggctaccagagcaacgaatgatgaaaggtgtaaaattctggaacaacgattagaacaaggaatggtattcacagaatatgaaagaattcttaagaaacggctagttgatggggagtgctcaacagcacgactccctgaaaatgcagaaagaaatcgattccaagatgttcttccttatgatgatgcgagagtggagttggtcccaactaaagaaaacaacactggttacatcaacgcatcacatattaaggtctctgtcagtggaatcgaatgggattatattgccacacagggaccattacagaatacctgtcaagatttttggcagatggtatgggaacagggaattgcaattatagcaatggtgacagcagaagaggagggtggaagggagaagagctttaggtactggccacgacttggttccaggcacaacactgtcacctatggaaggtttaagatcacgacccggttccgcacagactctggctgctatgccaccacaggcctgaagatgaagcacctccttaccgggcaagagaggaccgtctggcacctccaatacacagactggcctgaacatggctgtccagaagacctcaagggatttttatcatatcttgaagagatccagtctgttcgacgccatacaaatagcacaagtgatccccaaagccccaaccctccgttgttggtccactgcagtgctggggtaggaaggactggcgtggtgattttgtcggagatcatgatcgcctgcctggaacacaatgaggtgctggacatcccgagagtgctggacatgctgaggcaacagagaatgatgctggtgcagactctctgccagtacacatttgtgtacagagtcctcatccagttcctgaaaagctccaggctcatctaagctcccacaatttcttacggggccagtcatgtgaagcgtttacagcttaaaaaaaaagcgcttgcctaactcatactttcccgttgacacttgatccacgcagcgtggcactgggacgtaagtggcgcagtctgaatggcggcacgctgaaggaaacgtgcgaagcacaggctgaagaggggtttctaacctgggaaaggtgctcaaggaggacttggtttcaagggccttgccctgccccggtctgtccggtttgcagtacttgcacacattttggagattgtattttctagacaattctctattttactgaagctatgctgggcaattctggcaatcattaaagtgcatagatttctatcttaaaaaaaaaaaaa

SEQ ID NO: 57198 - DNA, 4215 bp, Homo Sapiens
gccgccgggcgccaggcctgagcggtgggagggctctgcggggcctggtgttcaggcgtcccaccacgagggtggagcagcgttggatacttgttccttagggaccgaagctccggtggcacccgggctatttctcagaggacaattagtaacgtgtcgccatgaggagccggagtaactccggggtccggctggacggctacgctcgactggtgcaacagaccatcctgtgccatcagaatccagtgactggcttgcttccagccagctatgatcagaaagatgcttgggtccgagataatgtgtacagcatcttggctgtgtggggtttgggcctggcctatcggaagaatgcagaccgggatgaggataaggcaaaggcctatgaattggagcagagtgtagtgaagctgatgagaggactactgcactgcatgatcagacaggtggataaagtagaatccttcaaatatagtcagagtactaaggatagcctccatgcaaagtacaacaccaaaacctgtgccactgtagtgggtgatgatcaatggggacacctgcagttggatgctacctctgtgtacctgctcttcttagcccaaatgactgcctcaggactccatatcatccacagcctagatgaagtcaatttcatacagaaccttgtgttttacattgaagctgcatataaaactgctgacttcgggatatgggaacgtggagacaagaccaaccaagggatctcagagttgaatgccagttcagttggaatggcaaaggcagccctggaagcattagatgaactggatctgtttggtgtgaaaggtgggcctcaatcagttatccatgtcctggctgatgaagtacagcactgccagtctatcctaaattcactactgccccgtgcttcaacatcaaaagaggttgatgctagtctactctcagtggtttccttccctgcctttgcagtagaggatagccagttggtggagctcacaaaacaggaaatcatcaccaagcttcagggtcgttatggttgctgtcgctttctacgagatggatataaaactcctaaagaggatcccaatcgtctgtactatgaaccagctgagctgaagctatttgaaaacattgagtgtgaatggccattgttctggacatactttattcttgatggggtcttcagtggcaatgcagaacaggttcaagaatataaagaggctcttgaagcagtcctcatcaagggcaaaaatggagtcccacttctgccagagctgtacagtgttcctcctgacagggtcgatgaagaatatcagaatcctcacactgtggaccgagtccccatggggaaattgcctcacatgtggggtcagtctctatacattttaggaagcttgatggcagagggatttttagcccctggagaaattgatcccctgaatcgcaggttttctactgtaccgaagcccgatgttgtggttcaagtctccattctagctgaaacagaagaaatcaagaccattttgaaggacaagggaatttacgtggagaccattgctgaggtataccccatcagagtacaaccagctcgtattctcagccacatttattccagcctaggatgcaacaatagaatgaaactcagtggacgaccctacagacacatgggagtgcttggaacttcaaaactctatgacattcggaaaactatctttactttcactccacagtttatagaccagcaacagttctacctggctctggacaacaagatgatagtggaaatgcttagaacagacctctcctacctctgtagccgctggcggatgacaggccagcccaccatcaccttccccatctcatacagcatgcttgatgaagatggaacaagcttgaattcaagtatcctggcagcactccgaaaaatgcaagatgggtattttggtggggcaagggttcaaacaggtaaattgtcagagtttttgacaacatcttgttgcacacacttgagcttcatggaccctggacctgagggtaagctgtacagtgaagattatgatgacaactatgattacctggaatctggcaactggatgaatgattatgattcaaccagtcatgctcgctgtggtgatgaagttgctcgttatttagatcaccttttggcgcacactgctccccatcctaaactagcccctacctcacagaagggagggctagatcggttccaagctgctgtgcaaacaacctgcgacttaatgtccttggtgaccaaggccaaggaactgcatgtacagaatgttcacatgtatcttcctacgaagttatttcaggcttcccggccttcattcaacttacttgattcacctcatccccgacaggagaaccaggttccctctgttcgtgtagaaatacatcttcctagagaccagtctggggaggtggactttaaagcactggttttacagttgaaggagacctcaagcttacaggaacaagctgatatcctctatatgctgtatactatgaaaggacctgactggaacactgaattgtataatgaacggagtgctacagtgagagagcttcttaccgagctgtatggcaaagtgggagaaattcgtcactggggcctgatccgatacatttctgggatcttaaggaagaaagtggaagcacttgatgaggcctgcacagaccttctctcccaccagaaacatttgacagtaggacttcctccagaacctcgagaaaagactatctctgcacctctgccctatgaggcgctcactcagctgatagatgaagccagtgaaggggatatgagcatttcaatccttacacaggaaataatggtatatctagccatgtatatgcgaacccagcctggcctctttgctgaaatgtttcgacttcgaattggtctgatcatacaagttatggcaacagaactggcccactcccttcgatgctcagctgaggaagccacagagggcctgatgaatctcagtccttcggccatgaagaatctcctgcatcacattctcagcggcaaggagtttggagtggaacgaagcgttcgtcccactgattcaaatgtcagtcctgctatttctatccacgagattggtgctgttggagcaaccaaaacagaacgaactgggatcatgcagttaaaaagtgagataaagcaggtggaatttcgtagactgtcaatctcagctgagagtcagtcacctggaacctctatgactccaagtagtgggtcctttcctagtgcatatgatcagcagtcatctaaagatagtcgtcaaggtcaatggcaacgccgaagaaggctggatggggcactgaatagagttccagttggattttatcagaaagtatggaaagttttgcagaagtgtcacggactttctgttgaagggtttgtccttccttcctctaccactagagagatgactccaggtgagattaaattctctgttcatgtggagtctgtcctgaatcgtgtacctcagccagagtaccgtcagctgctggttgaagccatccttgtcctcaccatgctggcagatattgaaattcatagcatcggaagcatcattgctgtggaaaaaatagtgcatattgccaatgacttgttccttcaagaacagaaaacccttggcgcagatgataccatgttggcaaaggatcccgcatctggcatctgtactcttctgtatgacagtgcacccagtggcaggtttggcaccatgacctacctctccaaggcagccgccacctacgtgcaggagttcctgccccacagcatctgtgccatgcaatgagggctttggttcctggcttctgggagccttttgacagctggtccctgcctcggttgattgtgcatggaactaaaatgttattgcctaatcactccaaccctgcccctttctgtcccatccttcccaagaagagagaactttttcgataaactaactactgtagaagaagtgaacacttacctggaggctcaccttgcagaaccagtgacaatcttatgagtataatgaacactcagccaggcctgtcatgattggctttatttctttcatcattcataaaagtttgcatgtgtttttattctctagatctgttaccaatatagttttctaactcctgtttggggagcaagtgttaataataacttattcctaaaaaaaaaaa

SEQ ID NO: 57199 - DNA, 3780 bp, Homo Sapiens
tgaagattcagttttcacttaaacaaccagcaagtcttgaagtctcttcccaagcaaatgggagcttctttggaccttggagcacacagaggattctactttctttaaaactttgttttcaggcaatttccctgagaaccgtttacttccagaagattggtggagcttgatctgaaggctggccatgaaatctcaaggtcaacattggtattccagttcagataaaaactgtaaagtgagctttcgtgagaagcttctgattattgattcaaacctgggggtccaagatgtggagaacctcaagtttctctgcataggattggtccccaacaagaagctggagaagtccagctcagcctcagatgtttttgaacatctcttggcagaggatctgctgagtgaggaagaccctttcttcctggcagaactcctctatatcatacggcagaagaagctgctgcagcacctcaactgtaccaaagaggaagtggagcgactgctgcccacccgacaaagggtttctctgtttagaaacctgctctacgaactgtcagaaggcattgactcagagaacttaaaggacatgatcttccttctgaaagactcgcttcccaaaactgaaatgacctccctaagtttcctggcatttctagagaaacaaggtaaaatagatgaagataatctgacatgcctggaggacctctgcaaaacagttgtacctaaacttttgagaaacatagagaaatacaaaagagagaaagctatccagatagtgacacctcctgtagacaaggaagccgagtcgtatcaaggagaggaagaactagtttcccaaacagatgttaagacattcttggaagccttaccgcaggagtcctggcaaaataagcatgcaggtagtaatggtaacagagccacaaatggtgcaccaagcctggtctccagggggatgcaaggagcatctgctaacactctaaactctgaaaccagcacaaagagggcagctgtgtacaggatgaatcggaaccacagaggcctctgtgtcattgtcaacaaccacagctttacctccctgaaggacagacaaggaacccataaagatgctgagatcctgagtcatgtgttccagtggcttgggttcacagtgcatatacacaataatgtgacgaaagtggaaatggagatggtcctgcagaagcagaagtgcaatccagcccatgccgacggggactgcttcgtgttctgtattctgacccatgggagatttggagctgtctactcttcggatgaggccctcattcccattcgggagatcatgtctcacttcacagccctgcagtgccctagactggctgaaaaacctaaactctttttcatccaggcctgccaaggtgaagagatacagccttccgtatccatcgaagcagatgctctgaaccctgagcaggcacccacttccctgcaggacagtattcctgccgaggctgacttcctacttggtctggccactgtcccaggctatgtatcctttcggcatgtggaggaaggcagctggtatattcagtctctgtgtaatcatctgaagaaattggtcccaagacatgaagacatcttatccatcctcactgctgtcaacgatgatgtgagtcgaagagtggacaaacagggaacaaagaaacagatgccccagcctgctttcacactaaggaaaaaactagtattccctgtgcccctggatgcactttcattatagcagagagtttttgttggttcttagacctcaaacgaatcattggctataacctccagcctcctgcccagcacaggaatcggtggtctccacctgtcattctagaaacaggaaacaccgtgttttctgacacagtcaattctgattttctttttcttttgcaagtctaaatgttagaaaactttcttttttttggagatagtctcattctgtcacccagactggagtgcaggggggcaatcacggctcactgtagtctcgacctcccaggctcaagctgtcctcccacctcagcctcccaagtagctgagactacaggtgtgtgtccatgcacagctaactttttattttttttgtggagatggggtttcactatgttgcctaagctggtctcaaactcctgggctcaagcgatcctcccacctcagcttctcaaagttctgggactacaggcatgaaatactgtgcctggcctggggaccaggtgcattttaaggttccttggtgttcaaaaaccacgttcttagcctagattgagcttagattgcctctctagacaactaccccttagttataattctgtgtcccctctgcatgcccttaaacattggacagtgaggtcacagtccacccaccctctctctgatctcccccttcctaagacttctcttttgcacatctagtgaggtgaaaatttggtctatgccaggcccatttcctgcttttgtgtaaggaaggtgctcacataggaagtttttatttggttagagacaggtttccctgtaggaagatgatggctcatttacactcagctgctctgcaagcagaaactttacaacctgatgtcatattccattttggactgggtgcggtgactcatgcctgtaatcccagtactctgggaagccaaggcaggcagatcacttgaggtcaggagttcgagaccagcctggccaatacggcaaaacctcatcattactaaaaacacaaaaattagccaggtgtggcggcgagcacctgtaatcccagctactcgggaggctgagacaggagaatctcttgaatccaggaggcagaggctgtggtgagccaagatgacacaactgcactccagcttgggcaacagggcgagaccttgtttaaaaaaaaaattcaatattggggttggaacatttcagttgccattgacagaacacccaattcaaattgactgaagcaaagaagggaatttattgcctctttcacattgaaacccaggagtggataacactggcttcaggcaaagcttgaatcaggactcaatctacaggccagcacctttctcttggccggatgtcctcagggctggcagatgcagtagactgcagtggacagtccccaccttgttactgctactacactttgctcctctggcccaaggcatgaggagagaggctgtgtcagaaactgaagctgttctcaggatcactgggctcttcttggcagaggggatgtctggcttgcctgaagggagtggctctgtaaggacgccttgatgctttcttcattaagattttgagcatttttacgtacttgagcttttttttttttttttttcaatttctagaggaactttttctctgttaattcctggaactgtattttgaatccttaaaggtgagccctcatagggagatccaaagtcctgtggttaacgccttcatttatagatgaggcagctgaggcctggggatgtgaacaacctgctcacagtcctcatttactggatttgacttcagccaggtgaactggaatgccttggggcgtggaagggcattaggagtgtttcatttgatatgtgaatgctcataaaaaaatgtcaaggaatgaagaacaacaactctcagtggtgcctgcatttataattatttatgtgaaagtcaaattcatgtacagtaaatttgttataagaatattcacaagaacactgttctgatatctctgattgtcatgtggatttgaatgtagcttgacagagaaaaaaaaaaaaa

SEQ ID NO: 57200 - DNA, 2220 bp, Homo Sapiens
gaacttctttcctggcacaggactcactgtgccccttcccgctgtgggtacaaggtctgccccccaccccagctctccaaagcccaccggcctccctggaggccgaggtcgacggcccgtcgcaccgggagggggggctcccaggggtgccccacgcacggtcaaggtcccgcgccaagcggggaccgggctgggccggaagcgggcacggtactcgcggcaaactagcgtgggcgagtcctgattgcagtcggacctgccgccgcggcacttaacagtttgcagagtgcttcccgcccctgatctcattggagccttcggacagcccagcccatggccaccgatgcccccatttcacgcctgaggaagcggaggctcagacgggccaccagcccctccggaggctggcccgggagcgcctggcagcgtcgggtctaggagccggctccctcctgctccctcctccgcgccgcccggggtgtgcccgccgtctgtgtgcaccactgctgagcccagctccggcgccctcgcctctgctgtgggccccggggacgcggggtcaggccaccgcgttggccaggccgctgcaggtaggcacggcccccaccaggcgccatggactggaagacactccaggccctactgagcggtgtgaacaagtactccacagcgttcgggcgcatctggctgtccgtggtgttcgtcttccgggtgctggtatacgtggtggctgcagagcgcgtgtggggggatgagcagaaggactttgactgcaacaccaagcagcccggctgcaccaacgtctgctacgacaactacttccccatctccaacatccgcctctgggccctgcagctcatcttcgtcacatgcccctcgctgctggtcatcctgcacgtggcctaccgtgaggagcgggagcgccggcaccgccagaaacacggggaccagtgcgccaagctgtacgacaacgcaggcaagaagcacggaggcctgtggtggacctacctgttcagcctcatcttcaagctcatcattgagttcctcttcctctacctgctgcacactctctggcatggcttcaatatgccgcgcctggtgcagtgtgccaacgtggccccctgccccaacatcgtggactgctacattgcccgacctaccgagaagaaaatcttcacctacttcatggtgggcgcctccgccgtctgcatcgtactcaccatctgtgagctctgctacctcatctgccacagggtcctgcgaggcctgcacaaggacaagcctcgagggggttgcagcccctcgtcctccgccagccgagcttccacctgccgctgccaccacaagctggtggaggctggggaggtggatccagacccaggcaataacaagctgcaggcttcagcacccaacctgacccccatctgaccacagggcaggggtggggcaacatgcgggctgccaatgggacatgcagggcggtgtggcaggtggagaggtcctacaggggctgagtgaccccactctgagttcactaagttatgcaactttcgttttggcagatattttttgacactgggaactgggctgtctagccgggtataggtaacccacaggcccagtgccagccctcaaaggacatagactttgaaacaagcgaattaactatctacgctgcctgcaaggggccacttagggcactgctagcagggcttcaaccaggaagggatcaacccaggaagggatgatcaggagaggcttccctgaggacataatgtgtaagagaggtgagaagtgctcccaagcagacacaacagcagcacagaggtctggaggccacacaaaaagtgatgctcgccctgggctagcctcagcagacctaaggcatctctactccctccagaggagccgcccagattcctgcagtggagaggaggtcttccagcagcagcaggtctggagggctgagaatgaacctgactagaggttctggagatacccagaggtcccccaggtcatcacttggctcagtggaagccctctttccccaaatcctactccctcagcctcaggcagtggtgctcccatcttcctccccacaactgtgctcaggctggtgccagcctttcagaccctgctcccagggacttgggtggatgcgctgatagaacatcctcaagacagtttccttgaaatcaataaatactgtgttttataaaa

SEQ ID NO: 57201 - DNA, 4370 bp, Homo Sapiens
ccgcgctctctgatcagaggcgaagctcggaggtcctacaggtatggatctctggcagctgctgttgaccttggcactggcaggatcaagtgatgctttttctggaagtgaggccacagcagctatccttagcagagcaccctggagtctgcaaagtgttaatccaggcctaaagacaaattcttctaaggagcctaaattcaccaagtgccgttcacctgagcgagagactttttcatgccactggacagatgaggttcatcatggtacaaagaacctaggacccatacagctgttctataccagaaggaacactcaagaatggactcaagaatggaaagaatgccctgattatgtttctgctggggaaaacagctgttactttaattcatcgtttacctccatctggataccttattgtatcaagctaactagcaatggtggtacagtggatgaaaagtgtttctctgttgatgaaatagtgcaaccagatccacccattgccctcaactggactttactgaacgtcagtttaactgggattcatgcagatatccaagtgagatgggaagcaccacgcaatgcagatattcagaaaggatggatggttctggagtatgaacttcaatacaaagaagtaaatgaaactaaatggaaaatgatggaccctatattgacaacatcagttccagtgtactcattgaaagtggataaggaatatgaagtgcgtgtgagatccaaacaacgaaactctggaaattatggcgagttcagtgaggtgctctatgtaacacttcctcagatgagccaatttacatgtgaagaagatttctactttccatggctcttaattattatctttggaatatttgggctaacagtgatgctatttgtattcttattttctaaacagcaaaggattaaaatgctgattctgcccccagttccagttccaaagattaaaggaatcgatccagatctcctcaaggaaggaaaattagaggaggtgaacacaatcttagccattcatgatagctataaacccgaattccacagtgatgactcttgggttgaatttattgagctagatattgatgagccagatgaaaagactgaggaatcagacacagacagacttctaagcagtgaccatgagaaatcacatagtaacctaggggtgaaggatggcgactctggacgtaccagctgttgtgaacctgacattctggagactgatttcaatgccaatgacatacatgagggtacctcagaggttgctcagccacagaggttaaaaggggaagcagatctcttatgccttgaccagaagaatcaaaataactcaccttatcatgatgcttgccctgctactcagcagcccagtgttatccaagcagagaaaaacaaaccacaaccacttcctactgaaggagctgagtcaactcaccaagctgcccatattcagctaagcaatccaagttcactgtcaaacatcgacttttatgcccaggtgagcgacattacaccagcaggtagtgtggtcctttccccgggccaaaagaataaggcagggatgtcccaatgtgacatgcacccggaaatggtctcactctgccaagaaaacttccttatggacaatgcctacttctgtgaggcagatgccaaaaagtgcatccctgtggctcctcacatcaaggttgaatcacacatacagccaagcttaaaccaagaggacatttacatcaccacagaaagccttaccactgctgctgggaggcctgggacaggagaacatgttccaggttctgagatgcctgtcccagactatacctccattcatatagtacagtccccacagggcctcatactcaatgcgactgccttgcccttgcctgacaaagagtttctctcatcatgtggctatgtgagcacagaccaactgaacaaaatcatgccttagcctttctttggtttcccaagagctacgtatttaatagcaaagaattgactggggcaataacgtttaagccaaaacaatgtttaaaccttttttgggggagtgacaggatggggtatggattctaaaatgccttttcccaaaatgttgaaatatgatgttaaaaaaataagaagaatgcttaatcagatagatattcctattgtgcaatgtaaatattttaaagaattgtgtcagactgtttagtagcagtgattgtcttaatattgtgggtgttaatttttgatactaagcattgaatggctatgtttttaatgtatagtaaatcacgctttttgaaaaagcgaaaaaatcaggtggcttttgcggttcaggaaaattgaatgcaaaccatagcacaggctaattttttgttgtttcttaaataagaaacttttttatttaaaaaactaaaaactagaggtgagaaatttaaactataagcaagaaggcaaaaatagtttggatatgtaaaacatttattttgacataaagttgataaagattttttaataatttagacttcaagcatggctattttatattacactacacactgtgtactgcagttggtatgacccctctaaggagtgtagcaactacagtctaaagctggtttaatgttttggccaatgcacctaaagaaaaacaaactcgttttttacaaagcccttttatacctccccagactccttcaacaattctaaaatgattgtagtaatctgcattattggaatataattgttttatctgaatttttaaacaagtatttgttaatttagaaaactttaaagcgtttgcacagatcaacttaccaggcaccaaaagaagtaaaagcaaaaaagaaaacctttcttcaccaaatcttggttgatgccaaaaaaaaatacatgctaagagaagtagaaatcatagctggttcacactgaccaagatacttaagtgctgcaattgcacgcggagtgagttttttagtgcgtgcagatggtgagagataagatctatagcctctgcagcggaatctgttcacacccaacttggttttgctacataattatccaggaagggaataaggtacaagaagcattttgtaagttgaagcaaatcgaatgaaattaactgggtaatgaaacaaagagttcaagaaataagtttttgtttcacagcctataaccagacacatactcatttttcatgataatgaacagaacatagacagaagaaacaaggttttcagtccccacagataactgaaaattatttaaaccgctaaaagaaactttctttctcactaaatcttttataggatttatttaaaatagcaaaagaagaagtttcatcattttttacttcctctctgagtggactggcctcaaagcaagcattcagaagaaaaagaagcaacctcagtaatttagaaatcattttgcaatcccttaatatcctaaacatcattcatttttgttgttgttgttgttgttgagacagagtctcgctctgtcgccaggctagagtgcggtggcgcgatcttgactcactgcaatctccacctcccacaggttcaggcgattcccgtgcctcagcctcctgagtagctgggactacaggcacgcaccaccatgccaggctaatttttttgtattttagcagagacggggtttcaccatgttggccaggatggtctcgatctcctgacctcgtgatccacccgactcggcctcccaaagtgctgggattacaggtgtaagccaccgtgcccagccctaaacatcattcttgagagcattgggatatctcctgaaaaggtttatgaaaaagaagaatctcatctcagtgaagaatacttctcattttttaaaaaagcttaaaactttgaagttagctttaacttaaatagtatttcccatttatcgcagaccttttttaggaagcaagcttaatggctgataattttaaattctctctcttgcaggaaggactatgaaaagctagaattgagtgtttaaagttcaacatgttatttgtaatagatgtttgatagattttctgctactttgctgctatggttttctccaagagctacataatttagtttcatataaagtatcatcagtgtagaacctaattcaattcaaagctgtgtgtttggaagactatcttactatttcacaacagcctgacaacatttctatagccaaaaatagctaaatacctcaatcagtctcagaatgtcattttggtactttggtggccacataagccattattcactagtatgactagttgtgtctggcagtttatatttaactctctttatgtctgtggattttttccttcaaagtttaataaatttattttcttggaaaaaaaaaaa

SEQ ID NO: 57202 - DNA, 2591 bp, Homo Sapiens
ctcagactgtccttcctctctggactgtaagaatatgtctccagggccagtgtctgctgcgatcgagtcccaccttccaagtcctggcatctcaatgcatctgggaagctacctgcattaagtcaggactgagcacacaggtgaactccagaaagaagaagctatggccgcagtgattctggagagcatctttctgaagcgatcccaacagaaaaagaaaacatcacctctaaacttcaagaagcgcctgtttctcttgaccgtgcacaaactctcctactatgagtatgactttgaacgtgggagaagaggcagtaagaagggttcaatagatgttgagaagatcacttgtgttgaaacagtggttcctgaaaaaaatcctcctccagaaagacagattccgagaagaggtgaagagtccagtgaaatggagcaaatttcaatcattgaaaggttcccttatcccttccaggttgtatatgatgaagggcctctctacgtcttctccccaactgaagaactaaggaagcggtggattcaccagctcaaaaacgtaatccggtacaacagtgatctggttcagaaatatcacccttgcttctggatcgatgggcagtatctctgctgctctcagacagccaaaaatgctatgggctgccaaattttggagaacaggaatggaagcttaaaacctgggagttctcaccggaagacaaaaaagcctcttcccccaacgcctgaggaggaccagatcttgaaaaagccactaccgcctgagccagcagcagcaccagtctccacaagtgagctgaaaaaggttgtggccctttatgattacatgccaatgaatgcaaatgatctacagctgcggaagggtgatgaatattttatcttggaggaaagcaacttaccatggtggagagcacgagataaaaatgggcaggaaggctacattcctagtaactatgtcactgaagcagaagactccatagaaatgtatgagtggtattccaaacacatgactcggagtcaggctgagcaactgctaaagcaagaggggaaagaaggaggtttcattgtcagagactccagcaaagctggcaaatatacagtgtctgtgtttgctaaatccacaggggaccctcaaggggtgatacgtcattatgttgtgtgttccacacctcagagccagtattacctggctgagaagcaccttttcagcaccatccctgagctcattaactaccatcagcacaactctgcaggactcatatccaggctcaaatatccagtgtctcaacaaaacaagaatgcaccttccactgcaggcctgggatacggatcatgggaaattgatccaaaggacctgaccttcttgaaggagctggggactggacaatttggggtagtgaagtatgggaaatggagaggccagtacgacgtggccatcaagatgatcaaagaaggctccatgtctgaagatgaattcattgaagaagccaaagtcatgatgaatctttcccatgagaagctggtgcagttgtatggcgtctgcaccaagcagcgccccatcttcatcatcactgagtacatggccaatggctgcctcctgaactacctgagggagatgcgccaccgcttccagactcagcagctgctagagatgtgcaaggatgtctgtgaagccatggaatacctggagtcaaagcagttccttcaccgagacctggcagctcgaaactgtttggtaaacgatcaaggagttgttaaagtatctgatttcggcctgtccaggtatgtcctggatgatgaatacacaagctcagtaggctccaaatttccagtccggtggtccccaccggaagtcctgatgtatagcaagttcagcagcaaatctgacatttgggcttttggggttttgatgtgggaaatttactccctggggaagatgccatatgagagatttactaacagtgagactgctgaacacattgcccaaggcctacgtctctacaggcctcatctggcttcagagaaggtatataccatcatgtacagttgttggcatgagaaagcagatgagcgtcccactttcaaaattcttctgagcaatattctagatgtcatggatgaagaatcctgagctcgccaataagcttcttggttctacttctcttctccacaagccccaatttcactttctcagaggaaatcccaagcttaggagccctggagcctttgtgctcccactcaatacaaaaaggcccctctctacatctggggatgcacctcttctttgattccctgggatagtggcttctgagcaaaggccaaaaaattattgtgcctgaaatttcccgagagaattaagacagactgaatttgcgatgaaaatattttttaggagggaggatgtaaatagccgcacaaaggggtccaacagctctttgagtaggcatttggtagagcttgggggtgtgtgtgtgggggtggaccgaatttggcaagaatgaaatggtgtcataaagatgggaggggagggtgttttgataaaataaattctagaaagcttaaaaaaaaaaaaaaaaaaa

SEQ ID NO: 57203 - DNA, 3336 bp, Homo Sapiens; identical to SEQ ID NO: 28996

SEQ ID NO: 57204 - DNA, 1641 bp, Homo Sapiens
caggagagggacaatggaagctgccccgtccaggttcatgttcctcttatttctcctcacgtgtgagctggctgcagaagttgctgcagaagttgagaaatcctcagatggtcctggtgctgcccaggaacccacgtggctcacagatgtcccagctgccatggaattcattgctgccactgaggtggctgtcataggcttcttccaggatttagaaataccagcagtgcccatactccatagcatggtgcaaaaattcccaggcgtgtcatttgggatcagcactgattctgaggttctgacacactacaacatcactgggaacaccatctgcctctttcgcctggtagacaatgaacaactgaatttagaggacgaagacattgaaagcattgatgccaccaaattgagccgtttcattgagatcaacagcctccacatggtgacagagtacaaccctgtgactgtgattgggttattcaacagcgtaattcagattcatctcctcctgataatgaacaaggcctccccagagtatgaagagaacatgcacagataccagaaggcagccaagctcttccaggggaagattctctttattctggtggacagtggtatgaaagaaaatgggaaggtgatatcatttttcaaactaaaggagtctcaactgccagctttggcaatttaccagactctagatgacgagtgggatacactgcccacagcagaagtttccgtagagcatgtgcaaaacttttgtgatggattcctaagtggaaaattgttgaaagaaaatcgtgaatcagaaggaaagactccaaaggtggaactctgacttctccttggaactacatatggccaagtatctactttatgcaaagtaaaaaggcacaactcaaatctcagagacactaaacaacaggatcactaggcctgccaaccacacacacacgcacgtgcacacacgcacgcacgcgtgcacacacacacgcgcacacacacacacacacacacagagcttcatttcctgtcttaaaatctcgttttctcttcttccttcttttaaatttcatatcctcactccctatccaatttccttcttatcgtgcattcatactctgtaagcccatctgtaacacacctagatcaaggctttaagagactcactgtgatgcctctatgaaagagaggcattcctagagaaagattgttccaatttgtcatttaatatcaagtttgtatactgcacatgacttacacacaacatagttcctgctcttttaaggttacctaagggttgaaactctaccttctttcataagcacatgtccgtctctgactcaggatcaaaaaccaaaggatggttttaaacacctttgtgaaattgtctttttgccagaagttaaaggctgtctccaagtccctgaactcagcagaaatagaccatgtgaaaactccatgcttggttagcatctccaactccctatgtaaatcaacaacctgcataataaataaaaggcaatcatgttaaaaaaaaaaaaaaaaaaaaaaaaaaaaaaaaaaaaaaaaaaaaaaaaaaaaaaaaaaaaaaaaaaaaaaaaaaaaaaaaaaaaaaaaaaaaaaaaaaaaaaaaaaaaaaaa

SEQ ID NO: 57205 - DNA, 3429 bp, Homo Sapiens
ggctggaagccggaagcgagcaaagtggagccgactcgaactccaccggcacgagggcggaaaagaaagcctcagaacgttcgctcgctgcgtccccagccggggccgagccctccgcgacgccacccgggccatgggggccgcacgcagcccgccgtccgctgtcccggggcccctgctggggctgctcctgctgctcctgggcgtgctggccccgggtggcgcctccctgcgactcctggaccaccgggcgctggtctgctcccagccggggctaaactgcacggtcaagaatagtacctgcctggatgacagctggattcaccctcgaaacctgaccccctcctccccaaaggacctgcagatccagctgcactttgcccacacccaacaaggagacctgttccccgtggctcacatcgaatggacactgcagacagacgccagcatcctgtacctcgagggtgcagagttatctgtcctgcagctgaacaccaatgaacgtttgtgcgtcaggtttgagtttctgtccaaactgaggcatcaccacaggcggtggcgttttaccttcagccactttgtggttgaccctgaccaggaatatgaggtgaccgttcaccacctgcccaagcccatccctgatggggacccaaaccaccagtccaagaatttccttgtgcctgactgtgagcacgccaggatgaaggtaaccacgccatgcatgagctcaggcagcctgtgggaccccaacatcaccgtggagaccctggaggcccaccagctgcgtgtgagcttcaccctgtggaacgaatctacccattaccagatcctgctgaccagttttccgcacatggagaaccacagttgctttgagcacatgcaccacatacctgcgcccagaccagaagagttccaccagcgatccaacgtcacactcactctacgcaaccttaaagggtgctgtcgccaccaagtgcagatccagcccttcttcagcagctgcctcaatgactgcctcagacactccgcgactgtttcctgcccagaaatgccagacactccagaaccaattccggactacatgcccctgtgggtgtactggttcatcacgggcatctccatcctgctggtgggctccgtcatcctgctcatcgtctgcatgacctggaggctagctgggcctggaagtgaaaaatacagtgatgacaccaaatacaccgatggcctgcctgcggctgacctgatccccccaccgctgaagcccaggaaggtctggatcatctactcagccgaccaccccctctacgtggacgtggtcctgaaattcgcccagttcctgctcaccgcctgcggcacggaagtggccctggacctgctggaagagcaggccatctcggaggcaggagtcatgacctgggtgggccgtcagaagcaggagatggtggagagcaactctaagatcatcgtcctgtgctcccgcggcacgcgcgccaagtggcaggcgctcctgggccggggggcgcctgtgcggctgcgctgcgaccacggaaagcccgtgggggacctgttcactgcagccatgaacatgatcctcccggacttcaagaggccagcctgcttcggcacctacgtagtctgctacttcagcgaggtcagctgtgacggcgacgtccccgacctgttcggcgcggcgccgcggtacccgctcatggacaggttcgaggaggtgtacttccgcatccaggacctggagatgttccagccgggccgcatgcaccgcgtaggggagctgtcgggggacaactacctgcggagcccgggcggcaggcagctccgcgccgccctggacaggttccgggactggcaggtccgctgtcccgactggttcgaatgtgagaacctctactcagcagatgaccaggatgccccgtccctggacgaagaggtgtttgaggagccactgctgcctccgggaaccggcatcgtgaagcgggcgcccctggtgcgcgagcctggctcccaggcctgcctggccatagacccgctggtcggggaggaaggaggagcagcagtggcaaagctggaacctcacctgcagccccggggtcagccagcgccgcagcccctccacaccctggtgctcgccgcagaggagggggccctggtggccgcggtggagcctgggcccctggctgacggtgccgcagtccggctggcactggcgggggagggcgaggcctgcccgctgctgggcagcccgggcgctgggcgaaatagcgtcctcttcctccccgtggaccccgaggactcgccccttggcagcagcacccccatggcgtctcctgacctccttccagaggacgtgagggagcacctcgaaggcttgatgctctcgctcttcgagcagagtctgagctgccaggcccaggggggctgcagtagacccgccatggtcctcacagacccacacacgccctacgaggaggagcagcggcagtcagtgcagtctgaccagggctacatctccaggagctccccgcagccccccgagggactcacggaaatggaggaagaggaggaagaggagcaggacccagggaagccggccctgccactctctcccgaggacctggagagcctgaggagcctccagcggcagctgcttttccgccagctgcagaagaactcgggctgggacacgatggggtcagagtcagaggggcccagtgcatgagggcggctccccagggaccgcccagatcccagctttgagagaggagtgtgtgtgcacgtattcatctgtgtgtacatgtctgcatgtgtatatgttcgtgtgtgaaatgtaggctttaaaatgtaaatgtctggattttaatcccaggcatccctcctaacttttctttgtgcagcggtctggttatcgtctatccccaggggaatccacacagcccgctcccaggagctaatggtagagcgtccttgaggctccattattcgttcattcagcatttattgtgcacctactatgtggcgggcatttgggataccaagataaattgcatgcggcatggccccagccatgaaggaacttaaccgctagtgccgaggacacgttaaacgaacaggatgggccgggcacggtggctcacgcctgtaatcccagcacactgggaggccgaggcaggtggatcactctgaggtcaggagtttgagccagcctggccaacatggtgaaaccccatctccactaaaaatagaaaaattagccgggcatggtgacacatgcctgtagtcctagctacttgggaggctgaggcaggagaattgcttgaatctgggaggcagaggttgcagtgagccgagattgtgccattgcactgcagcctggatgacagagcgagactctatctcaaaaaaaaaaaaaaaaaa

SEQ ID NO: 57206 - DNA, 5030 bp, Homo Sapiens
gctaactcaagggagacgtctggtgaacacccgtgggatctaaagaacaagctctgaaagtgttccagctgaaatttcagatcggacagactcgctgcggctccggaggcagtgattccaagctgctcgcgcacgctgctgccaagctgcaggatggtgcacgtagccaggctgctgctgctgctcctcactttcttcctccgcacggatgctgagacacctccaaggtttacacgaacacccgttgatcagacaggggtctctggcggagttgcctctttcatctgccaagctacgggagacccaagacctaaaattgtctggaacaaaaaaggaaagaaagtcagcaatcagagatttgaggtaatagagtttgacgatgggtctggatcagttctcagaatacaacccttacggactccgagggatgaggccatttatgaatgtgtggcctcaaataatgtgggagaaataagtgtatccaccagactcacagttttgcgggaagatcaaattcccaggggcttccctaccattgacatgggcccacagttgaaggtggttgagcgtactcgcacggccaccatgctttgtgcagccagtggtaatccggatccagaaatcacttggtttaaagatttcttacctgtggacacaagcaacaacaatggtcgtattaagcagttacgatcagaatctattggtggtacaccaataagaggagcccttcagattgagcagagtgaagagtctgaccaaggaaaatatgagtgtgttgccaccaacagcgcgggcactcgctattccgctcctgccaatttatatgtcagagagctgcgagaagttcgccgtgtcccaccaagattctctatcccacccactaatcatgaaatcatgccaggcggaagcgttaatatcacctgtgtggccgtggggtcaccaatgccttatgtaaagtggatgttgggggcagaagatctgacacctgaagatgatatgccaataggaagaaatgtgctagaactgaatgatgtaagacagtcagcaaattacacctgtgttgctatgtcaacactgggtgtcattgaagcaatagcacagatcactgtcaaagccttacccaaacctccaggaactcctgtagtgaccgagagcacagctacaagcatcacactgacgtgggactctgggaaccctgagcctgtttcttattacataattcagcataaacctaaaaactctgaggaactttacaaagaaattgatggggtggcgaccacacgctacagtgtcgctggactaagtccctactcggattatgaattcagggttgttgctgtcaataacattgggcgggggcctcccagcgaacctgtgctaacacaaacctcagagcaagcaccatccagtgccccgagggatgtccaggcacgaatgttgagttcgaccaccattttggtacagtggaaggaacctgaagagccaaatggacagatccaaggatatagagtttattatacaatggatcccactcaacatgtcaacaactggatgaaacacaatgtagctgacagccaaatcactactattggcaacttagtgccccagaaaacatattctgtcaaagtcctggcttttacctcaattggagatggtcccctttcaagtgacatacaagtcatcactcagacaggagtaccagggcagccactaaacttcaaagcagaacctgagtctgaaacaagtattttgctctcttggacacctccacgttcagataccattgccaactatgaactggtctacaaagatggggagcatggagaggagcaacgaattaccattgagccagggacatcatataggctgcaaggactgaaaccaaacagcttatactatttccgtctggctgcacgctcccctcaaggcctgggtgcttctactgcagaaatatcagctagaaccatgcagtcaatgtttgcaaaaaattttcatgtcaaagcagtaatgaagacttccgtgttgctgtcttgggagattccagagaattataactccgccatgcctttcaaaattctttatgatgatgggaaaatggtagaagaagtggatggccgagccacacagaagttaattgtcaacctgaagcctgagaaatcatattcatttgtgctgacaaatcgtggaaacagtgctggtgggctgcagcacagggtcacggcaaagactgcaccagatgtattacgtaccaagcctgccttcattgggaagaccaacttggatggcatgattactgtgcaactgcctgaagtacctgcaaatgagaatataaaaggttactacataataattgtgcctttgaagaaatctcgcgggaaatttatcaagccatgggagagtccagatgaaatggaattagatgagctgcttaaggagatatctaggaagcgcagaagcatccgttatgggagagaagttgaattaaagccatatattgccgctcactttgatgtccttcccactgagttcaccctgggggatgacaagcattatggtggatttacaaacaagcaactccaaagtggtcaagaatatgtcttctttgtgttagcagtaatggaacatgcagagtctaagatgtatgcaaccagcccttactccgaccccgtggtgtcaatggatctggatccgcagccaatcacggatgaagaagaaggcttgatctgggttgtaggtcctgtccttgcagtggtctttatcatctgcattgtcattgctattcttctttataaaaggaagagggcagagtccgactctagaaaaagcagcataccgaacaataaggagatcccttcacaccacccaacagaccctgtagaactgaggcgccttaactttcaaacaccgggtatggctagccatcctccaatacccatcttggaacttgcagaccacattgaaagattgaaagcaaatgacaacttgaagttttcccaggaatatgagtcaattgaccctggccagcagttcacttgggaacattcaaacttggaagtaaacaaaccaaagaatagatacgcgaatgtaatcgcatatgatcattcccgggttctcctatcagctatagaagggatcccaggaagtgactatgtgaatgccaactacatagatgggtataggaagcaaaatgcctatattgcaacacagggatctctccccgaaacatttggggacttttggagaatgatatgggaacaacggagtgccacagttgtcatgatgacaaaactagaagaaagatcaagggtgaagtgtgaccagtattggcctagcagaggcacagaaacccacggactcgttcaagtaacgctgcttgatactgtggagctggccacatattgtgttcgaacatttgcactttacaagaatggttcaagtgagaagagagaagtgagacaattccagttcaccgcctggcctgatcatggtgttccagaacaccctacaccttttctagctttcttacgtagagtcaaaacctgtaaccctcccgatgctggtccgatggttgtgcactgcagtgcgggagttggccggactggttgcttcatcgtcatagatgccatgttagaaagaataaagcatgaaaaaactgtagatatttatggccatgtaactttaatgagagcccagaggaactatatggttcaaacagaagaccaatacatctttatccatgatgcactgttagaagcagtgacttgtggaaataccgaagtgccagctagaaacttgtatgcctacattcagaagctgacacaaatagaaacgggagagaatgtcacaggaatggagctcgaatttaagcgtctagccagctcaaaagctcacacctcaaggtttatcagtgccaatcttccatgtaataaattcaaaaatcgccttgttaatattatgccatatgaatccacaagggtatgcctgcagcctatccgtggagtagaaggatctgattacatcaatgccagttttattgatggatacagacaacagaaagcctacatcgctacccaggggcccttggcagagaccactgaagacttctggcggatgctctgggaacacaattccaccatagttgtgatgctcaccaagctgcgtgaaatgggcagagagaaatgtcaccaatactggccagcagaacggtctgcaagataccagtactttgttgtagatcccatggctgagtacaacatgccacagtatatcctaagggaattcaaggtcacagatgccagggacggccagtcccgaacagtaaggcagttccagttcactgactggccagagcaaggagtgccaaagtccggagaaggatttattgacttcatcggccaagtccataaaacaaaagaacagtttggccaagatggacccatttcagtccattgcagcgcgggcgttggaagaactggagtcttcataacgctaagcattgttttggaaagaatgagatatgaaggagttgtagatatcttccagactgtcaaaatgttaagaacacaacgaccagctatggtacagacagaggatcaatatcagttttcctatcgtgccgcactagagtacctgggcagctttgaccactatgcaacgtagaaacccctgacccattctggatttttactacaggcccttcaatatccatggagtctcttctgagccatacagggcacttgagaagtccttcttaacttctagctaacaactacttagtgggactattacacacaaaacaaattaaaaacaaattattccaggtggaccaagaattctttgacatcgccccttcccaccatactgctcataataacattttaggggccaaggggagggaatgtttaaaaagaaagtccttgatttagttttttagtattgtaaagatactgctgacctgtgcttcatttctaactgtgtaaacttttttttaacaaaatgtatcattcgataaagtgaattttaaaaaagtt

SEQ ID NO: 57207 - DNA, 4171 bp, Homo Sapiens
gggccgcctctgcacgtccgccccggagcccgcacccgcgccccacgcgccgccgaggactcggcccggctcgtggagcccttcgcccgcggcgtgagtacccccgacccgcccgtccccgctctgctcgcgccctgccgctgcgccgccctcggtggcttttccgacgggcgagccccgtgctgtgcgggaaagaatccgacaacttcgcagcccatcccggctggacgcgaccgggagtgcagcagcccgttcccctcctcggtgccgcctctgcccagcgtttgcttggctgggctaccacctgcgctcggacggcgctcggagggtcctcgcccccggcctgcctacctgaaaaccagaactgatggctctatttgcagtctttcagacaacattcttcttaacattgctgtccttgaggacttaccagagtgaagtcttggctgaacgtttaccattgactcctgtatcacttaaagtttccaccaattctacgcgtcagagtttgcacttacaatggactgtccacaaccttccttatcatcaggaattgaaaatggtatttcagatccagatcagtaggattgaaacatccaatgtcatctgggtggggaattacagcaccactgtgaagtggaaccaggttctgcattggagctgggaatctgagctccctttggaatgtgccacacactttgtaagaataaagagtttggtggacgatgccaagttccctgagccaaatttctggagcaactggagttcctgggaggaagtcagtgtacaagattctactggacaggatatattgttcgttttccctaaagataagctggtggaagaaggcaccaatgttaccatttgttacgtttctaggaacattcaaaataatgtatcctgttatttggaagggaaacagattcatggagaacaacttgatccacatgtaactgcattcaacttgaatagtgtgcctttcattaggaataaagggacaaatatctattgtgaggcaagtcaaggaaatgtcagtgaaggcatgaaaggcatcgttctttttgtctcaaaagtacttgaggagcccaaggacttttcttgtgaaaccgaggacttcaagactttgcactgtacttgggatcctgggacggacactgccttggggtggtctaaacaaccttcccaaagctacactttatttgaatcattttctggggaaaagaaactttgtacacacaaaaactggtgtaattggcaaataactcaagactcacaagaaacctataacttcacactcatagctgaaaattacttaaggaagagaagtgtcaatatcctttttaacctgactcatcgagtttatttaatgaatccttttagtgtcaactttgaaaatgtaaatgccacaaatgccatcatgacctggaaggtgcactccataaggaataatttcacatatttgtgtcagattgaactccatggtgaaggaaaaatgatgcaatacaatgtttccatcaaggtgaacggtgagtacttcttaagtgaactggaacctgccacagagtacatggcgcgagtacggtgtgctgatgccagccacttctggaaatggagtgaatggagtggtcagaacttcaccacacttgaagctgctccctcagaggcccctgatgtctggagaattgtgagcttggagccaggaaatcatactgtgaccttattctggaagccattatcaaaactgcatgccaatggaaagatcctgttctataatgtagttgtagaaaacctagacaaaccatccagttcagagctccattccattccagcaccagccaacagcacaaaactaatccttgacaggtgttcctaccaaatctgcgtcatagccaacaacagtgtgggtgcttctcctgcttctgtaatagtcatctctgcagaccccgaaaacaaagaggttgaggaagaaagaattgcaggcacagagggtggattctctctgtcttggaaaccccaacctggagatgttataggctatgttgtggactggtgtgaccatacccaggatgtgctcggtgatttccagtggaagaatgtaggtcccaataccacaagcacagtcattagcacagatgcttttaggccaggagttcgatatgacttcagaatttatgggttatctacaaaaaggattgcttgtttattagagaaaaaaacaggatactctcaggaacttgctccttcagacaaccctcacgtgctggtggatacattgacatcccactccttcactctgagttggaaagattactctactgaatctcaacctggttttatacaagggtaccatgtctatctgaaatccaaggcgaggcagtgccacccacgatttgaaaaggcagttctttcagatggttcagaatgttgcaaatacaaaattgacaacccggaagaaaaggcattgattgtggacaacctaaagccagaatccttctatgagtttttcatcactccattcactagtgctggtgaaggccccagtgctacgttcacgaaggtcacgactccggatgaacactcctcgatgctgattcatatcctactgcccatggttttctgcgtcttgctcatcatggtcatgtgctacttgaaaagtcagtggatcaaggagacctgttatcctgacatccctgacccttacaagagcagcatcctgtcattaataaaattcaaggagaaccctcacctaataataatgaatgtcagtgactgtatcccagatgctattgaagttgtaagcaagccagaagggacaaagatacagttcctaggcactaggaagtcactcacagaaaccgagttgactaagcctaactacctttatctccttccaacagaaaagaatcactctggccctggcccctgcatctgttttgagaacttgacctataaccaggcagcttctgactctggctcttgtggccatgttccagtatccccaaaagccccaagtatgctgggactaatgacctcacctgaaaatgtactaaaggcactagaaaaaaactacatgaactccctgggagaaatcccagctggagaaacaagtttgaattatgtgtcccagttggcttcacccatgtttggagacaaggacagtctcccaacaaacccagtagaggcaccacactgttcagagtataaaatgcaaatggcagtctccctgcgtcttgccttgcctcccccgaccgagaatagcagcctctcctcaattacccttttagatccaggtgaacactactgctaaccagcatgccgatttcataccttatgctacacagacattaagaagagcagagctggcaccctgtcatcaccagtggccttggtccttaatcccagtacaatttgcaggtctggtttatataagaccactacagtctggctaggttaaaggccagaggctatggaacttaacactccccattggagcaagcttgccctagagacggcaggatcatgggagcatgcttaccttctgctgtttgttccaggctcacctttagaacaggagacttgagcttgacctaaggatatgcattaaccactctacagactcccactcagtactgtacagggtggctgtggtcctagaagttcagtttttactgaggaaatatttccattaacagcaattattatattgaaggctttaataaaggccacaggagacattactatagcatagattgtcaaatgtaaatttactgagcgtgttttataaaaaactcacaggtgtttgaggccaaaacagattttagacttaccttgaacggataagaatctatagttcactgacacagtaaaattaactctgtgggtgggggcggggggcatagctctaatctaatatataaaatgtgtgatgaatcaacaagatttccacaattcttctgtcaagcttactacagtgaaagaatgggattggcaagtaacttctgacttactgtcagttgtacttctgctccatagacatcagtattctgccatcatttttgatgactacctcagaacataaaaaggaacgtatatcacataattccagtcacagtttttggttcctcttttctttcaagaactatatataaatgacctgttttcacgcggccgc

SEQ ID NO: 57208 - DNA, 2323 bp, Homo Sapiens
gaccaagcattcagcaagccactcttccacctcccttactgcaggaaggcactccgaagacataagtcggtgagacatggctgaagataaaagcaagagagactccatcgagatgagtatgaagggatgccagacaaacaacgggtttgtccataatgaagacattctggagcagaccccggatccaggcagctcaacagacaacctgaagcacagcaccaggggcatccttggctcccaggagcccgacttcaagggcgtccagccctatgcggggatgcccaaggaggtgctgttccagttctctggccaggcccgctaccgcatacctcgggagatcctcttctggctcacagtggcttctgtgctggtgctcatcgcggccaccatagccatcattgccctctctccaaagtgcctagactggtggcaggaggggcccatgtaccagatctacccaaggtctttcaaggacagtaacaaggatgggaacggagatctgaaaggtattcaagataaactggactacatcacagctttaaatataaaaactgtttggattacttcattttataaatcgtcccttaaagatttcagatatggtgttgaagatttccgggaagttgatcccatttttggaacgatggaagattttgagaatctggttgcagccatacatgataaaggtttaaaattaatcatcgatttcataccaaaccacacgagtgataaacatatttggtttcaattgagtcggacacggacaggaaaatatactgattattatatctggcatgactgtacccatgaaaatggcaaaaccattccacccaacaactggttaagtgtgtatggaaactccagttggcactttgacgaagtgcgaaaccaatgttattttcatcagtttatgaaagagcaacctgatttaaatttccgcaatcctgatgttcaagaagaaataaaagaaattttacggttctggctcacaaagggtgttgatggttttagtttggatgctgttaaattcctcctagaagcaaagcacctgagagatgagatccaagtaaataagacccaaatcccggacacggtcacacaatactcggagctgtaccatgacttcaccaccacgcaggtgggaatgcacgacattgtccgcagcttccggcagaccatggaccaatacagcacggagcccggcagatacaggttcatggggactgaagcctatgcagagagtattgacaggaccgtgatgtactatggattgccatttatccaagaagctgattttcccttcaacaattacctcagcatgctagacactgtttctgggaacagcgtgtatgaggttatcacatcctggatggaaaacatgccagaaggaaaatggcctaactggatgattggtggaccagacagttcacggctgacttcgcgtttggggaatcagtatgtcaacgtgatgaacatgcttcttttcacactccctggaactcctataacttactatggagaagaaattggaatgggaaatattgtagccgcaaatctcaatgaaagctatgatattaatacccttcgctcaaagtcaccaatgcagtgggacaatagttcaaatgctggtttttctgaagctagtaacacctggttacctaccaattcagattaccacactgtgaatgttgatgtccaaaagactcagcccagatcggctttgaagttatatcaagatttaagtctacttcatgccaatgagctactcctcaacaggggctggttttgccatttgaggaatgacagccactatgttgtgtacacaagagagctggatggcatcgacagaatctttatcgtggttctgaattttggagaatcaacactgttaaatctacataatatgatttcgggccttcccgctaaaataagaataaggttaagtaccaattctgccgacaaaggcagtaaagttgatacaagtggcatttttctggacaagggagagggactcatctttgaacacaacacgaagaatctccttcatcgccaaacagctttcagagatagatgctttgtttccaatcgagcatgctattccagtgtactgaacatactgtatacctcgtgttaggcacctttatgaagagatgaagacactggcatttcagtgggattgtaagcatttgtaatagcttcatgtacagcatgctgcttggtgaacaatcattaattcttcgatatttctgtagcttgaatgtaaccgctttaagaaaggttctcaaatgttttgaaaaaaaaaaaaaaaaaaaaaaaaaaaaaa

SEQ ID NO: 57209 - DNA, 2058 bp, Homo Sapiens
gcccagacctatggattgaaagcgtgtgctttacccatctgctgtcttgctccatctgagaccagagccaagatctgcccaggactggaatgctttcccgagtggcttgagttggagcctgggactaggagcagccttattgaggtacaattcatgtgcttgtgggtttggatggcacaatctgtgtctgggctaaggaaagcagacttggcaccaacattaaccctgacagatccaggcatctattccaggaactggaagccaagcgcaacaggtgcttggaggtcatcatgatcagcccagaccccaggccctcccctggcttggcccggtgggctgagagctatgaggccaagtgtgagcgcaggcaagagatccgtgaaagccgccgctgccgtcccaatgtgaccacttgccgccaggtggggaagacgctgaggatccaacagagagagcagctccagagagctcgactgcagcagttcttcaggaggaggaacctggagctagaggagaagggcaaagcgcagcatccccaggccagggagcaagggccctccaggcggccaggacaggtgacaggcaccagctctgaagtctttccagcccagcatcctcctccctcaggcatctgcagggatctgtctgaccacctctcctcacaggctgggggccttcctccacaggacactcccatcaagaagccacccaaacaccaccgtggtactcagacaaaggcagaaggaccaacaattaagaacgatgccagtcagcaaaccaattacggagttgcagttctggataaggaaatcatccagctttctgattacctcaaagaggccctacaaagggagctggtcctaaaacagaaaatggtgattctccaagacctactgtccactctgattcaggcctctgacagctcttggaagggacagcttaatgaagacaaactgaaggggaaactgagatccttagaaaaccagctatacacctgtacccagaaatactccccttggggaatgaaaaaagtactactggagatggaagaccagaaaaacagctatgagcagaaggccaaggagtcactgcagaaagtgctggaggagaaaatgaatgcagagcagcaactacagagcacacagcgatccctggccctggcagagcagaagtgtgaagagtggaggagccagtatgaggctctgaaggaggactggaggacccttgggacccagcacagggagctggagagccaactccacgtgcttcagtccaaactgcagggagcagatagcagggacttacagatgaaccaggccctgcgatttttggaaaatgagcaccagcaactgcaggccaagattgaatgcctgcaaggggacagagacctgtgcagcttggatacccaggacctacaagatcaactaaaaaggtcagaggcagagaaactcaccctggtgaccagagtacagcagttgcagggtttgcttcaaaatcaatccttacagcttcaagaacaggagaaactcttaacaaagaaagatcaggctttgcccgtgtggagtccaaagtccttccctaacgaagtggagcctgagggtacagggaaggagaaagactgggatctcagagaccagctgcaaaagaagactttgcagctccaggccaaggaaaaggagtgcagagaactgcattcagaattagacaacctcagtgacgagtatctctcctgcctgcgtaagctgcagcactgtcgagaagagctgaaccagagccagcagctgcctcccagaaggcaatgtgggcgatggctcccagtgctgatggtggtgattgctgcagcactggcagtgttcctggccaataaagacaacctgatgatctgaataatttgtgacaactgccttgggtgaaaatcagaagcaagcaactcagcgaaaaactcagaaggtttgggtacattacagcttgggttttccaactgacttaggatttctgactttttattaatttcttaacctactgtaaataaacttcacctgaccagattgttcctca

SEQ ID NO: 57210 - DNA, 6567 bp, Homo Sapiens
ggtgtgagatggcagacaggtttgcaggaaaccctcagaaagggggctggaggatttagccactctgtcctccccttccggcagtccagggcctcctcccgagcacagcggcgctatggactctccaggatacaactgcttcgtggacaaagacaagatggacgctgccatccaggacctggggcccaaggagctgagctgcactgaactgcaggaactgaagcagctggcgcgccagggctactgggcccaaagccacgccctgcggggaaaggtgtaccagcgcctgatccgggacattccctgccgcacggtcacgcctgacgccagcgtgtacagcgacatcgtgggcaagatcgtgggcaagcacagcagcagctgcctgccgctgcccgagttcgtggacaacacgcaggtgcccagctactgcctgaatgcacgcggcgagggggccgtgcgcaagatcctcctgtgcctggccaaccagttccccgacatctccttctgccccgccctgccggccgtggtggccctgctgctgcactacagcatcgacgaggccgagtgcttcgagaaggcctgccgcatcctggcctgcaatgaccccggcaggaggctgatcgaccagagcttcctggcctttgagtcgtcctgcatgacgtttggggacctggtgaacaagtactgccaggcggcccacaagctgatggtggccgtgtcggaggatgtcctgcaggtctatgcggactggcagcgctggctgtttggggagctgcccctctgctacttcgcccgggtctttgacgtcttcctggtggagggctacaaggtgctgtaccgcgtggcgctggccatcctcaagttcttccacaaggtgagggccgggcagccgctggagtcggacagcgtgaagcaggacatccgcacgttcgtcagagacatcgcgaagacggtgtcccctgagaagctgctggagaaagcgttcgccatccgcctcttctcccgcaaggagatccagctcctgcagatggccaatgagaaagccctgaagcagaagggcatcaccgtgaagcagaagagtgtgtcactttctaaaaggcagtttgtacacttggccgtccatgcagagaacttccgctcggagatcgtcagcgtgagggagatgagagacatctggtcctgggtccccgagcgctttgccctgtgccagccccttctgctgttctcctccctgcagcacgggtacagcctggccaggttctacttccagtgtgaaggacatgagcctaccctcttgctcatcaagaccacgcagaaggaggtgtgtggtgcttacctgtccacagactggagtgagagaaataagtttggaggcaaactgggcttctttgggaccggagaatgctttgtgtttaggctgcagcctgaggtgcagcgctacgagtgggtggtgatcaagcaccccgagctgaccaagcccccacccttgatggctgccgagcccaccgccccactcagccactccgcctcctcagaccccgctgaccgcctctcgcccttcctggccgctcgccacttcaacctgccctccaagaccgagtccatgttcatggcggggggcagcgactgcctcatcgtcgggggaggaggcggccaggcgctctacatcgatggggacctgaaccggggccgcacaagccactgcgacaccttcaacaaccagcccctctgctccgagaacttcctcattgctgccgtggaggcctggggcttccaggaccctgacacccagtgacggcctgtgccacggtgactgagccgtggtggggcggtgggccgaggctgggctgccgcctcgggcagcagagagcagatgaaacccccatgtggtaggcagggttgggggacggcaggaccccatggccaagcctggcgttgcctggacctgctgctgcctctacctggggtttgggctgggcttccccagtccacctgcatctgggtcagagctggagggcctgctgtgcccccagccccacccagagctggcataggaagtaccttcctcctccgtggaggcttccatagcccaaggccttgggagtgtctgggtcttgctgcccctgagcctctctaggcagcctgagcccctggggtgggagtacaacggcagtgggaacgtgcagctaagggtgggcctgtggtgccccctgctggtgccgcatagcatcgcgccctcctgagcagggccctgcagcctggctggctggcgactgaatcccagcgtagatcccgagaacagactggcacccttgggcctgccccctggcggaccccaccccctgtcctgggcgtttgccccagttccctccccaggcctcctgggccacctctcacattaacccttcttggctgcctctgaggctcccctgggctgcgtttgggagctgctgggtgggaggaggagggtgggatttgtgctgggctccacccccagggagggtgggagctggagggggatgtcacatgtccttgtgtttctgcagagcctgaagcttttgctgggcctccctgcgtgttcccatctgaagaggtagccccgggagaggccctcagggaccgacccagaccagcaagctccatttccaggggtctgcccagagaagcctggacccagggggcttctcagctcccctcccttccagcccaggcctccttgagctcctgtagcctctgcagctgcccatttcacctctttgtcattgcaatgacctggggcccagggtcacgcccaagcccctctttgtggcatgctcatctcagtgcagccccaactgcttctctgcaccaggccccgtgccctcccctggccctggccacacagcacctccttggccaccttgcatggatgcatgtcctccctctgtccctcttgtggtgctgtggctggccacgtgtcagggttttctgtgagcctctcaccttacagcctttgggcccctgggcccctgccctgcctgagccctgcgctggccagacgcaggtaggtgccaggggaggccttgcctctgggcactatagggggcagccccctgccttgtgacctccctccatgccccatgacctccttcaactcgtcttgagggtctggtcaccacggaggggagaagggagacacagaggcccaagtggctgttctgggaccatggaagcctgggtcacagaggcaggtaccagcagtcctgcccccacccccgtccctgctggcctccagccagtgccacttggagtcccctgcaccgtgccactttccatccccacaccattgcctgctcctcccatggggctttagcctcccctgaccatctgctcatgtagcctctgactgggcgcacagtggtgcaggaggaaggaccgggaaccctgtgtggctttgggcaagctgacaaacccgtctggaactcagtttccccagctgtgaaatggggccagtccccatgccctgctgtcctcctcacaggactgttgagaggctcgcagggggatggggtgaatccctctcacggggagaggtatgggagggaagtcgccactcatctcagcccaccgcagccctccaggcccccgcctgagcccctgaggccctcatctgtaccgccagctttggtgttcattaaacatggtcttgctgcatcaactccagggctccaagctgagtctgatctcttcagccagaggggcctccgggggcttcctgggcctacagccaagcaggtgtgggaggctgcccgctgtagtgctcacccacattctatgactggaatgctgcaagcctcttccagagggagccctccaggagcagggaagtcatatccgtggaccatttgtaggtttccctctgcaaacttcctgaactgggtggtgatttttctggcgagttaagtccagcaggttctgcgtggctgcccccagggggccccacccgggccttccagtgatctggaccaggaagacggattgctgctgggtcatgatttccacatcatgagcgaagttctttgttttttgtgtgcatgcaaaatattgtttctttaaatttaatatcttttcctaacttttctactaacctagaaggtatgtgtgattattatcttttttattcttatcactgtacttgttagtatctgatattaggtattcccaaatagaacataatttattttgttaatgttctctatttcttcttgattatttattagctttggatgttaaaaattagccaaaagtggctgctctgcctatgaagtagccattctttgtttaaaaaaaaaaaaagccaacatttgttgaaactgcataataaattatcatttgtttttagaaacattcaaagaattattttttgattttttttttttttgggacagagtcacccaggctggagtgcagtggcatgatcttggctcactgcaacctccgcctcctgggttcaagcgattctcctgcctcagcctcctgagtagctgggattacaggcatacgccaccacgcccagctaaattttttttgtatttttagtagaggcagggtttcactgtgttggtcaggctggtcttgaactcctgacctcgtgatccacccccccctcagcctcccaaagtgctgggattacaggcgtgagccaccgcgcctagcctattttttaatttttttgaatagaccactttgtgctgaataaatgtttaacatttatttttaaaacaacaattgcacctaatttaaaatagtttattaaatgaattcattaaagcagattatatgcctttggggcttcagaaaatcagtttaagcaaaagaacttatgagagtaagtcatttgtacttgaattttttcagagttttaatgaactaaagtattttaatttttctatttttgtaagccgcatacttcattttttgagtttttcagtggaatttgttttaaaacgttttgaagatttcagaggccttcatatttctcttatccactttctgaacccataaagcctttgcagtctccttgagtagtttatatttagtaatttagttgtgtacctttttattttgaagtaatttttgatttgcagaagagttgcagagacggtacagggtttccatgtaccctcaccttcccccaagtcaatatcaaaacaaagaaataagcattgttgcattgctgttaactaaaccacaggcctattgagattgtcccttttttttttttttttttttttgagacagagtctcgctctgtcgcccaggctggagtgcagtggcgcgatctcggctcaccgcaagccccgcctcccggattcacgccattctcctgcctcagcctcctgagtagctgggactacaggcacctgctaccacacccggctaatttttttatatttttagtagagatggggtttcaccgtgttagccaggatggtcttgatctcctgacctcgtgatctgccctcctcggcctcccaaagtgctgggattacaggcgtgagcaaccgcgcccagccgagattgccccgtttttttcccactgtccaggaatcgatttaatttttacagttgtttactttctcacatttttactaagtccagaatatcatcaaactcacaaaaccactggtcaaaaaaacccaaatggccactaattaggcaatacagcacctgcctcaaatttgggttcatatagatttttttcctccctttttgtggagaacatagtcttgctgtgttgcccaggctagtcttgaactcctggactcaagcaatcctcccgcctctgcctccctaaattctgggattacaggcgtgagctgctgtgcccagctcatccagattcttgctggttctctttctcagcctaaatgtcttgtttgcgtggagaaattatcaaatgaagcaggagtgccaaacaagcctcataggctcttcaccctacaacatctatgttaggtagaaaagtatgtggatttttaaaaatcatctggtataaagagtttttaagaactatcttcatcatcttagtatcagattgtgcttgagaagttaggtacaatgtaatgtgattcattgctaaaaacaaaatgcctcccacaattgcagactcactcattttaccaaactatggaatttgtcaacaccttttcttgggaccaaggaagcaaagtcagtggataccgtgtcctgtagacatgtcacttgtgataaggcacggacaacatgaactggcaaaaacattggcatttggtcaaatgcttatgagctaaggatagaagggaaaaaatagttgtgtgaatgattttacctcttagttcttacgaaggatggttatcgggctggaaaaatgtttattggactgatgctttggagcctctcaatgaatgtaataaaaaaaatgtgtagtgagcacaaatgtatggatttgcagcacaatccaactttgaaaatgtgaaaataagtgagttagtgatatgtttggttggtgttaatttgagtcctaaataaaatcgagaactggtaaaa

SEQ ID NO: 57211 - DNA, 4918 bp, Homo Sapiens
ccaccgactcctgcccgcctcaacacaatgccttacctgtgaagcttgaggccactcaagttccaaatttgtgacaaatcccccagggctcactggagtggcagatatagacctgcagctaactggatttgatttataagagagaaatctgcagtcaatgcccactcttgccacactgctaatatggaaaacagaatgttcaataggatatggtctgataaatagtgatgattgaagatgctgctccaatacatgtgaaatcaatgggagatatctgctgtctgaagatctttcagagcttttctcgacaagctcccctgtaagaaatcggaggtatattctaccattatacagtctttctcaagtggatataaatacgtttgcctcactgtaaccagacaactagacaactaatgtgggaccatggcactgcccagatgcacgtggccaaattatgtttggagagcagtgatggcatgcttggtacaccggggattgggtgccccattgactctctgtatgttgggatgtttgcttcaggctggccatgtgctatcacaaaaattggatgatgtggacccactggtggctaccaactttggaaagataagagggattaagaaggaactcaataatgaaattttggggcctgttattcaatttcttggggttccatatgcagccccaccaacaggggaacgtcgttttcagcctccagaaccaccatctccctggtcagatatcagaaatgccactcaatttgctcctgtgtgtccccagaatatcattgatggcagattgccagaagtcatgcttcctgtgtggtttactaataacttggatgtggtttcatcatatgtgcaagaccagagcgaagactgcctatatttaaatatatatgtcccgactgaggatgatattcgggacagtgggggtcccaaaccagtgatggtgtatatccatggtggctcatatatggaaggtactggaaatttatatgatggaagtgtcttggcaagttatggcaatgtgatcgtcatcacagtcaactatcgacttggagtactcggtttcttgagtacaggcgatcaggctgcaaaggggaactatggactccttgatctcatacaagctttaagatggactagtgaaaacattggattctttggtggtgaccccttaagaatcactgtttttggatctggtgctgggggttcatgtgtcaacctgctgactttatcccattattctgaaggtaaccgttggagcaattcaaccaaaggactttttcaacgagcaatagctcaaagtggaacagccctttccagctgggctgttagttttcaacctgcaaaatatgctagaatgttggccacaaaagttggttgcaatgtttcagatacagtagagttagtggaatgcctacagaagaagccttacaaagaacttgttgaccaagatattcaaccagctcgataccacatagcctttggacctgtgattgatggtgatgtaataccagacgacccccagatattgatggagcaaggagagtttctcaactatgatataatgttaggagtgaaccaaggggaagggttaaaatttgttgaaaatatagtagatagcgatgatggtatatcagctagtgattttgactttgctgtttcaaattttgttgataatttatatggatatcctgaaggcaaagatgttttgagagaaaccattaagttcatgtatactgactgggctgaccgtcataaccctgaaaccagaagaaagacattactggctttgtttacggaccatcagtgggtggcaccagctgtagccacagcggatcttcactcaaactttggttcacctacgtacttctatgccttttaccatcattgccaaacagatcaggttccagcttgggctgatgcagcccacggagacgaggttccctatgtactgggaatccccatgattggccctacagagttatttccttgcaatttctccaaaaatgatgtgatgctgagtgcagttgtaatgacatactggacaaattttgctaaaactggtgacccaaatcaaccagtccctcaagacacgaaattcattcataccaaacccaaccgttttgaagaagtagcatggaccagatattcccagaaagaccaactttatctccatattggattaaaaccaagagttaaagaacattacagagccaataaggtgaacctctggttggagttggtacctcatctgcataatctcaatgacatttctcagtatacctctacaacaactaaagtgccatcaactgacatcactttcagacctacgagaaaaaattctgtacctgtcacgtcagcctttcccactgccaagcaggatgatcccaaacaacaaccaagtccattttcagtggatcaaagggactactcaacagagctgagtgtcactattgcagttggagcatcactgctgtttctgaacatcttggcctttgcagccctgtactacaaaaaggataagaggagacatgatgttcacaggagatgcagccctcagcgcactactaccaatgatctaacccatgcacaagaagaggaaatcatgtccctccaaatgaagcacactgatttggatcatgaatgtgagtccattcatccacatgaggtggttcttcggaccgcctgtcccccagattacacactagctatgaggaggtcacctgatgatgttcccttaatgacacccaacaccattacaatgattcccaacactataccagggattcagcccttacacacattcaatacatttactggaggacagaacaatactctgccccatccccatccccacccccattcacattcaacaaccagggtatagccagataagagaaacaaactattttttttgatggattgcagtaaacgatcactgaagattccttggctttcaacctacaagacttactatttaaataaggaggaatattatgtgaatatacatatcaagaactttgggggttttgaaaaaaatgaattgtatatatacaaatcaactttaaaaacaaatttcaattgcttgaagcaattgttctgaatgatactttttcattcacattcaagaattaattttttgaagatttaagttacataatggaattaggcatgtggaacaccaaacaggaaagaactatgtctgaaatataaaaaataaaaataaaaaaacaactatgaatatgcacaagggacacaccagtggaatgtcagataattttcaccagtttttatttggagccgttttattgtgtagaccatatttacatatttggataagtacacaaagcgtcaatgctgttaatggccttagcaaaggctcatgctgaaatttgccagtaaaacaaagaagtttaaagactggcaggtacaccattatcacataagtgctgtcagtataaagttgtggggataaaggaaactggatatttttagcacgatgtgcatgataatttatatgcttggtggctgtgctgctgattaagccgtaattaaaattcttctcatcccattggagtttttaatagaagcttcctccatcaattggcagaacctaaagaagattttaaggggcaaaagtaattacaataaaataattcacagtagtttcaatatagaaggaattagctattaaaggtatttgaagaaactataggtatagtggtgaatactcgctgatatgaatcccagaaaaaaatttcctgtttttaatgttcttttcaatcccatctagataatttatagaaatataaccctaattggacatgtggtacaggatctataagttgctgtgtttttttgttactctgtattttgttccttttggtaaggtgaagtgtgtccaaagagttacttgcaacagtctttcatgatatgaggatgcccccgtattaccactctgattatagttctgagttctttgatttactcatgctgcatgacaaaatgtttactaataacaattcattataaagttatatccctctttacatcacttatctttctcactgaggttcattcactggaatttactcacgcaatctcagtagagtacaacgtagatacagaacctaggagagtcaacatctggaggattttagtctttcttacacatatgtgtgattttaaacgaatattctcagaccacaggaaactcttcatccccctgttgtttaccagtaacagtatatcacagacctttccaaatgtttgtatatgtaatcagatgtacatttatattgaaaaacaaatgagatggacttaaagagcacatcctgataaatactttctctctcacctgtactatatttctattagactaaagttatgtgattttttttttacattttttcagatgactagcaattttgatagtttataagataatgcaaagaactttctctgacaaactaactgcagtaacagaaacctttcttttcagttactctttttcaagaatgaaagattattatacaaaaaattgtatactacttgatggaaccaactttgtacatcttggccatgtcactggtcattgtgtgaaataaagataatctggataatgactattagtccaatgctaagaaacatgatctttgctcattaaagagctaaaatgtttattgctgttttgtctttcttttttctaaaaaaagaaaaaaaagaaaaaaaggaaaagaagaacaaagaaacatgactgtctcaaagagtaatttttctagattagaccagtcaggtttttgaagacatataggtaacttccacagaaaacacaaacatgtatttaaaggcaagtctcatctaagatgaaactcataaaaattatttaatgtttgttatgaatttaaaag

SEQ ID NO: 57212 - DNA, 2214 bp, Homo Sapiens
cctgtttcccaggaacggtccccggcttcgcgccccaatttctaacagcctgcctgtcccccgggaacgttctaacatccttggggagcgccccagctacaagacactgtcctgagaacgctgtcatcacccgtagttgcaagtttcggagcggcagtgggaagcatgcgggactacgacgaggtgatcgccttcctgggcgagtgggggcccttccagcgcctcatcttcttcctgctcagcgccagcatcatccccaatggcttcaatggtatgtcagtcgtgttcctggcggggaccccggagcaccgctgtcgagtgccggacgccgcgaacctgagcagcgcctggcgcaacaacagtgtcccgctgcggctgcgggacggccgcgaggtgccccacagctgcagccgctaccggctcgccaccatcgccaacttctcggcgctcgggctggagccggggcgcgacgtggacctggggcagctggagcaggagagctgcctggatggctgggagttcagccaggacgtctacctgtccaccgtcgtgaccgagtggaatctggtgtgtgaggacaactggaaggtgcccctcaccacctccctgttcttcgtaggcgtgctcctcggctccttcgtgtccgggcagctgtcagacaggtttggcaggaagaacgttctcttcgcaaccatggctgtacagactggcttcagcttcctgcagattttctccatcagctgggagatgttcactgtgttatttgtcatcgtgggcatgggccagatctccaactatgtggtagccttcatactaggaacagaaattcttggcaagtcagttcgtattatattctctacattaggagtgtgcacattttttgcagttggctatatgctgctgccactgtttgcttacttcatcagagactggcggatgctgctgctggcgctgacggtgccgggagtgctgtgtgtcccgctgtggtggttcattcctgaatctccccgatggctgatatcccagagaagatttagagaggctgaagatatcatccaaaaagctgcaaaaatgaacaacatagctgtaccagcagtgatatttgattctgtggaggagctaaatcccctgaagcagcagaaagctttcattctggacctgttcaggactcggaatattgccataatgaccattatgtctttgctgctatggatgctgacctcagtgggttactttgctctgtctctggatgctcctaatttacatggagatgcctacctgaactgtttcctctctgccttgattgaaattccagcttacattacagcctggctgctattgcgaaccctgcccaggcgttatatcatagctgcagtactgttctggggaggaggtgtgcttctcttcattcaactggtacctgtggattattacttcttatccattggtctggtcatgctgggaaaatttgggatcacctctgctttctccatgctgtatgtcttcactgctgagctctacccaaccctggtcaggaacatggcggtgggggtcacatccacggcctccagagtgggcagcatcattgccccctactttgtttacctcggtgcttacaacagaatgctgccctacatcgtcatgggtagtctgactgtcctgattggaatcctcaccctttttttccctgaaagtttgggaatgactcttccagaaaccttagagcagatgcagaaagtgaaatggttcagatctgggaaaaaaacaagagactcaatggagacagaagaaaatcccaaggttctaataactgcattctgaaaaaatatctaccccatttggtgaagtgaaaaacagaaaaataagaccctgtggagaaattcgttgttcccactgaaatggactgactgtaacgattgacaccaaaatgaaccttgctatcaagaaatgctcgtcatacagtaaactctggatgattcttccagataatgtccttgctttacaaaccaaccatttctagagagtctccttactcattaattcaatgaaatggattggtaagatgtcttgaaaacatgttagtcaaggactggtaaaatacatataaagattaacactcatttccaatcatacaaatactatccaaataaaaataacatcattgtattaacgcaaatattaggtgacaacaaaaaaaaaaaaaaaaaaaaaaaa

SEQ ID NO: 57213 - DNA, 3100 bp, Homo Sapiens
actcgtctctggtaaagtctgagcaggacagggtggctgactggcagatccagaggttcccttggcagtccacgccaggccttcaccatggatcagttccctgaatcagtgacagaaaactttgagtacgatgatttggctgaggcctgttatattggggacatcgtggtctttgggactgtgttcctgtccatattctactccgtcatctttgccattggcctggtgggaaatttgttggtagtgtttgccctcaccaacagcaagaagcccaagagtgtcaccgacatttacctcctgaacctggccttgtctgatctgctgtttgtagccactttgcccttctggactcactatttgataaatgaaaagggcctccacaatgccatgtgcaaattcactaccgccttcttcttcatcggcttttttggaagcatattcttcatcaccgtcatcagcattgataggtacctggccatcgtcctggccgccaactccatgaacaaccggaccgtgcagcatggcgtcaccatcagcctaggcgtctgggcagcagccattttggtggcagcaccccagttcatgttcacaaagcagaaagaaaatgaatgccttggtgactaccccgaggtcctccaggaaatctggcccgtgctccgcaatgtggaaacaaattttcttggcttcctactccccctgctcattatgagttattgctacttcagaatcatccagacgctgttttcctgcaagaaccacaagaaagccaaagccattaaactgatccttctggtggtcatcgtgtttttcctcttctggacaccctacaacgttatgattttcctggagacgcttaagctctatgacttctttcccagttgtgacatgaggaaggatctgaggctggccctcagtgtgactgagacggttgcatttagccattgttgcctgaatcctctcatctatgcatttgctggggagaagttcagaagatacctttaccacctgtatgggaaatgcctggctgtcctgtgtgggcgctcagtccacgttgatttctcctcatctgaatcacaaaggagcaggcatggaagtgttctgagcagcaattttacttaccacacgagtgatggagatgcattgctccttctctgaagggaatcccaaagccttgtgtctacagagaacctggagttcctgaacctgatgctgactagtgaggaaagatttttgttgttatttcttacaggcacaaaatgatggacccaatgcacacaaaacaaccctagagtgttgttgagaattgtgctcaaaatttgaagaatgaacaaattgaactctttgaatgacaaagagtagacatttctcttactgcaaatgtcatcagaactttttggtttgcagatgacaaaaattcaactcagactagtttagttaaatgagggtggtgaatattgttcatattgtggcacaagcaaaagggtgtctgagccctcaaagtgaggggaaaccagggcctgagccaagctagaattccctctctctgactctcaaatcttttagtcattatagatcccccagactttacatgacacagctttatcaccagagagggactgacacccatgtttctctggccccaagggaaaattcccagggaagtgctctgataggccaagtttgtatcaggtgcccatccctggaaggtgctgttatccatggggaagggatatataagatggaagcttccagtccaatctcatggagaagcagaaatacatatttccaagaagttggatgggtgggtactattctgattacacaaaacaaatgccacacatcacccttaccatgtgcctgatccagcctctcccctgattacaccagcctcgtcttcattaagccctcttccatcatgtccccaaacctgcaagggctccccactgcctactgcatcgagtcaaaactcaaatgcttggcttctcatacgtccaccatggggtcctaccaatagattccccattgcctcctccttcccaaaggactccacccatcctatcagcctgtctcttccatatgacctcatgcatctccacctgctcccaggccagtaagggaaatagaaaaaccctgcccccaaataagaagggatggattccaaccccaactccagtagcttgggacaaatcaagcttcagtttcctggtctgtagaagagggataaggtacctttcacatagagatcatcctttccagcatgaggaactagccaccaactcttgcaggtctcaacccttttgtctgcctcttagacttctgctttccacacctgcactgctgtgctgtgcccaagttgtggtgctgacaaagcttggaagagcctgcaggtgccttggccgcgtgcatagcccagacacagaagaggctggttcttacgatggcacccagtgagcactcccaagtctacagagtgatagccttccgtaacccaactctcctggactgccttgaatatcccctcccagtcaccttgtgcaagcccctgcccatctgggaaaataccccatcattcatgctactgccaacctggggagccagggctatgggagcagcttttttttcccccctagaaacgtttggaacaatgtaaaactttaaagctcgaaaacaattgtaataatgctaaagaaaaagtcatccaatctaaccacatcaatattgtcattcctgtattcacccgtccagaccttgttcacactctcacatgtttagagttgcaatcgtaatgtacagatggttttataatctgatttgttttcctcttaacgttagaccacaaatagtgctcgctttctatgtagtttggtaattatcattttagaagactctaccagactgtgtattcattgaagtcagatgtggtaactgttaaattgctgtgtatctgatagctctttggcagtctatatgtttgtataatgaatgagagaataagtcatgttccttcaagatcatgtaccccaatttacttgccattactcaattgataaacatttaacttgtttccaatgtttagcaaatacatattttatagaacttc

SEQ ID NO: 57214 - DNA, 3342 bp, Homo Sapiens
ggaggccgagctcggctgggcttggcgaggctgcggcgcggccaccggcgggagtgcagcggccactgtacccagagattcaaaaccccaaacccgggacttgggggcgctgagccgggccgggaagcagagcctggtcgtgaggaacagccgcccgttgctgtctgcccctttgcggacagcgtctccctcgactccgcttaggaagtggtgggggcggcgtggcccccgtcgggaggcgttcgaacgcccgctaggagagagaaaggattcccctgtgcttggagcccgcactcgggcgcggagggagcggcggcaggctctcgctttcggcaccatgggctgcacgctgagcgccgaggacaaggcggcggtggagcggagtaagatgatcgaccgcaacctccgtgaggacggcgagaaggcggcgcgcgaggtcaagctgctgctgctcggtgctggtgaatctggtaaaagtacaattgtgaagcagatgaaaattatccatgaagctggttattcagaagaggagtgtaaacaatacaaagcagtggtctacagtaacaccatccagtcaattattgctatcattagggctatggggaggttgaagatagactttggtgactcagcccgggcggatgatgcacgccaactctttgtgctagctggagctgctgaagaaggctttatgactgcagaacttgctggagttataaagagattgtggaaagatagtggtgtacaagcctgtttcaacagatcccgagagtaccagcttaatgattctgcagcatactatttgaatgacttggacagaatagctcaaccaaattacatcccgactcaacaagatgttctcagaactagagtgaaaactacaggaattgttgaaacccattttactttcaaagatcttcattttaaaatgtttgatgtgggaggtcagagatctgagcggaagaagtggattcattgcttcgaaggagtgacggcgatcatcttctgtgtagcactgagtgactacgacctggttctagctgaagatgaagaaatgaaccgaatgcatgaaagcatgaaattgtttgacagcatatgtaacaacaagtggtttacagatacatccattatactttttctaaacaagaaggatctctttgaagaaaaaatcaaaaagagccctctcactatatgctatccagaatatgcaggatcaaacacatatgaagaggcagctgcatatattcaatgtcagtttgaagacctcaataaaagaaaggacacaaaggaaatatacacccacttcacatgtgccacagatactaagaatgtgcagtttgtttttgatgctgtaacagatgtcatcataaaaaataatctaaaagattgtggtctcttttaagttttgcagttcatggtaaaatgcattttcaaaccaaatgagtacttatatatggatctctgtagactagagtcttgcagcaacacagaatgtaatataaggcaaatgcatctgggacttgaccaaagttgttctgttttgtttttttaactgaaagtaacagaaggacctttcttaaatgtgacagatggtcctgcagtgtgaaactgaaggacagtgttaaagctgggctctagtatattgatgatttctgcataagtgtaaatatgcaaatgtatgtatacatgtatttatgactttagttttcgacattatttttaggttttaagagtggcaacttaggattttagggtgatggctttggaaataacataaatataccttgtactgaatgacagactattactacgtttgccagttttaaacagctttatttatgttcatgtcctgtaaatttttaagtacagtaattaatattaggaaacattacagcccttatctagattatatgtatacttgtattaataaaaatgttatttgtacaaacattgcacagactattttaataacatgatttgttctttaaattttatgtgttttattgaaatgttcttaagatgaatacacctgcctttggatcaactatttaaacattgtatgcattttgatttttcctactttaagaaaataaaataatttaattttacattagattccacgttagatttggtttgaaaaactaaaatttcagatttctgaggatatactgtcttagacttattgtacacacttagtttttattcacttgttttcactctgaattttaatatttggctgatatgaatgcattgcctcaaaggtgatgtcatcttaatttttattcactttaaataactacatttttgtttataactaagtttggagggatcctaagagcatttttgtgggtaaaaaaaaaacctgtggacataatgaattttgagacattgattggtgaggcttttatttcccttgaggagtctcttgtacctagcatacatgatagctccttgttgggaagataacaagaaggatctttgaatactctattgctgatataatgcaagatttaaatttatacatataactaatttcaaatgtaattatcacactatgttaaaattacttttttcccttagataattcaaatttctccacttgcttgagattatatcatttctttttcaattatactattatttctgagaatgaaatggacgattacacttagaaaatgagtaatagtgtttaataagtcagtgattatatgtgtgctcaaataagtgttatgtatcagctagatactgagctttgatagaataattttcttttgattattcatgatgtgtcatctctgaccttgtttcagcaaagtaaacagcactccccaccccaccctcctttttttactcatcttggaaaaggttagtctttcagtacacgttgctggtaagtagtttccaagttacgtgttgtcactgggttgaagtatatttgtgtgtgtgtgtgtgtgtgtgtgtgtgtgtgtaaccataaactatattcatatctgtttcatttggaggattttcttctttgtaatgtaaagaaattcaaagttatcaaagttccttaaatgtgttagtttagattctttatgtgcctttcatgaaagatatgttttcattaattttactggtggacctgtaatatccacattgtgaagctgtgtatgaaattcaactataatatgaataaatttgaatcatgagaattatgggttaaaaagccacaaagaagcacatattggtgaccatcattaatgaaatcctgaactttattctgtgtaattgtgttaataaatcctaataaatttaaatttttaaaattttacaaacaaaaaaaaaaaaaaaaaaaaaaaa

SEQ ID NO: 57215 - DNA, 3944 bp, Homo Sapiens
cctacctggccatggccaacggagtgatcccgccgcccgggggcgcctcccccctaccccaggtccgggtgcccttggaggagccccctctaagtccagacgtggaggaggaggacgatgacttgggcaagaccttggctgtgagcaggtttggggacctcatcagcaagcccccggcctgggaccccgagaagcccagccgcagctacagcgagcgggactttgagtttcaccggcacacatcccaccacacccaccacccgctctcagcgcgcctgcctccaccccacaagctgcggcggctgccccccacctctgcccggcacaccaggagaaagaggaagaaggagaaaacctctgctcctccctccgaggggacccctcccatccaggaggaggggggagctggagtggatgaggaagaggaggaagaggaggaagaggaaggagaatctgaggcagaacctgtggagccccccccctcagggaccccacagaaggcaaagttctccattggaagtgacgaggatgacagtccaggcctccctgggagggctgctgtcaccaagcccctgccctcggtgggcccacacactgacaagagcccccagcactccagcagctcccccagcccccgggcccgggcctcccgactcgctggggagaaaagccggccctggagcccatcggccagttatgacctgcgggagcgactgtgcccaggcagtgccctgggcaacccaggtggtccagagcagcaggtgcccacagatgaggcggaggcccagatgctgggttctgcagacctggacgacatgaagagtcaccgactggaggacaaccctggtgtgcggcgacacttagtgaaaaagccctcccggacgcagggcgggaggggcagtcccagcggcctggcccccatccttcgcaggaagaagaagaagaaaaagctggaccggaggcctcatgaggtgttcgtggagctgaacgagctgatgctggaccgcagccaggagccccactggcgggagacggcccgctggatcaagtttgaggaggacgtggaggaggagacggagcgctgggggaagccccatgttgcctcgctctccttccgtagccttctggagctcaggaggaccatcgcccatggagctgccctcctggacctggagcaaaccaccctgccaggcattgcacacctcgtggtggagaccatgattgtgtctgaccagatccggccggaggacagggccagcgtcctacgtaccctgctactgaagcacagccatcccaacgatgacaaggacagtggcttctttccccgaaacccatcgagctccagcatgaactcggttctggggaatcatcacccaactcccagccatggccctgatggggcggtgcctaccatggctgatgacctgggggagccagccccactctggccacatgaccctgacgccaaggagaagcccctccacatgcctgggggagatggtcaccgggggaaaagcctgaagctgctggagaagatccctgaagatgctgaggccacggttgtgcttgtgggttgtgtgcctttcttggagcagcctgcagcagccttcgtgcgtctgaatgaggctgtactcctggagtctgtgcttgaggtccctgtcccggtccgcttcctcttcgtgatgctggggcccagccacaccagcactgactatcacgagcttgggcgctccattgccacccttatgtctgacaagctgtttcatgaggctgcctaccaggcagatgaccggcaagacctcctaagtgccatcagcgagttcctggatggcagcattgtgatccccccgtccgaggtggagggccgtgacctgctgcgctccgtggctgctttccagcgagagctgcttaggaagcggcgagagcgtgaacagaccaaagtcgagatgaccacacggggtggctacacggcccctgggaaagaactgtctttggagttggggggctctgaggcgacccctgaagatgaccccttgctgcggacgggctcggtatttggggggcttgtgcgggatgtgaggcgccggtacccgcactaccccagtgacctgcgagatgcgctgcactcccagtgtgtggccgctgtgctcttcatctacttcgcagccctcagccctgccatcaccttcggggggctgctgggagagaagaccgaggggctgatgggcgtgtccgagctgatcgtgtccaccgctgtgctcggcgtcctcttctctctgctgggagctcagccgctgcttgtggttggcttctctgggccgctgcttgtgtttgaggaagccttcttcaagttctgccgagcccaggacctggaatacctcactggccgggtgtgggttggtctctggctggtggtcttcgtccttgccctggtggccgccgaaggcagcttcctggtccgctacatctcgcctttcacccaggagatctttgcctttctcatctcactcattttcatctacgagaccttctacaagctctacaaggtgttcacagagcacccactgctgccgttctacccccctgagggggccctggaggggtccctggctgctggtctggagccaaatggcagtgccctgccccccaccgagggcccccccagcccgaggaaccagcccaatacggcactgctctcactcatcctcatgctcgggaccttcttcatagccttcttcctgcgcaagttcaggaacagccgcttcctggggggcaaggctcgtcgcatcatcggggactttggcatccccatctccatcctggtgatggtcctggtggattactccatcacagacacctacacgcagaagctgacagtgcctacagggctctcagtgacctctcccgataagcgctcgtggttcatcccacccctggggagtgcccgtcctttcccgccgtggatgatggtggcagccgctgttcccgccctcctcgtcctcatcctgatcttcatggagacacagatcacggcgcttatcgtcagccagaaggcgcggaggctgctcaagggctccggtttccacctggacctgctcctcattggctccctgggggggctctgtgggctgtttgggttgccctggctcacggctgccacggtccgctccgtcacccatgtcaatgcgttgacagtgatgcgtactgccatcgcgcctggtgacaagccccagatccaggaggtgcgggagcagcgggtcactggtgtgctcatcgccagcctcgtgggcctgtccatcgtcatgggggctgtgctgcgtcggatcccattggctgtgctctttgggatcttcctgtacatgggggtcacgtccctgtctggtatccagctgtcccagcgtctgttgctcatcctcatgccggcaaaacaccatcctgagcagccctatgtgaccaaggtgaagacgtggcggatgcatctgttcacctgcatccagctgggctgcatcgcactgctctgggtggtcaagtccacggcggcctcactcgcctttcccttcctgctgctgctcacggtgcctctgaggcattgccttctgccccggctcttccaggacagggagctgcaggcgctggactcggaagatgctgaaccaaacttcgatgaggatggccaggatgagtacaatgagctgcacatgccagtgtgaccctgaagacagtgcccctcagagaccccaagaccttagggattgacacctgggcctcaggcagagcccagccctgggctggggggctcctcaggacctagagatgtgcctggaaccactcctgatgccatggctagagtggcccccctgacttctgcccggggtgttgacctcgcctcacctttcacagaccagaccggcacaggctttgagctcattataaccacactcctg

SEQ ID NO: 57216 - DNA, 3958 bp, Homo Sapiens
gtgcattgagcgcgctccagctgccgggacggagggggcggcccccgcgctcgggcgctcggctacagctgcggggcccgaggtctccgcgcactcgctcccggcccatgctggaggcggcggaaccgcggggacctaggacggaggcggcgggcgctgggcggcccccggcacgctgagctcgggatgcggacgctgctgcctcccgcgctgctgacctgctggctgctcgcccccgtgaacagcattcacccagaatgccgatttcatctggaaatacaggaggaagaaacaaaatgtgcagagcttctgaggtctcaaacagaaaaacacaaagcctgcagtggcgtctgggacaacatcacgtgctggcggcctgccaatgtgggagagaccgtcacggtgccctgcccaaaagtcttcagcaatttttacagcaaagcaggaaacataagcaaaaactgtacgagtgacggatggtcagagacgttcccagatttcgtcgatgcctgtggctacagcgacccggaggatgagagcaagatcacgttttatattctggtgaaggccatttataccctgggctacagtgtctctctgatgtctcttgcaacaggaagcataattctgtgcctcttcaggaagctgcactgcaccaggaattacatccacctgaacctgttcctgtccttcatcctgagagccatctcagtgctggtcaaggacgacgttctctactccagctctggcacgttgcactgccctgaccagccatcctcctgggtgggctgcaagctgagcctggtcttcctgcagtactgcatcatggccaacttcttctggctgctggtggaggggctctacctccacaccctcctggtggccatgctcccccctagaaggtgcttcctggcctacctcctgatcggatggggcctccccaccgtctgcatcggtgcatggactgcggccaggctctacttagaagacaccggttgctgggatacaaacgaccacagtgtgccctggtgggtcatacgaataccgattttaatttccatcatcgtcaattttgtccttttcattagtattatacgaattttgctgcagaagttaacatccccagatgtcggcggcaacgaccagtctcagtacaagaggctggccaagtccacgctcctgcttatcccgctgttcggcgtccactacatggtgtttgccgtgtttcccatcagcatctcctccaaataccagatactgtttgagctgtgcctcgggtcgttccagggcctggtggtggccgtcctctactgtttcctgaacagtgaggtgcagtgcgagctgaagcgaaaatggcgaagccggtgcccgaccccgtccgcgagccgggattacagggtctgcggttcctccttctcccgcaacggctcggagggcgccctgcagttccaccgcggctcccgcgcccagtccttcctgcaaacggagacctcggtcatctagccccacccctgcctgtcggacgcggcgggaggcccacggttcggggcttctgcggggctgagacgccggcttcctccttccagatgcccgagcaccgtgtcgggcaggtcagcgcggtcctgactccgtcaagctggttgtccactaaaccccatacctggaattggagtcgtgttgtcattgactcgatttaaactccagcatttagataatcttgtgcaaaatgtgtttcagccgtatagtggatccacttttttttttttttttttttgagacggagtcttgctctgtcgcccaggctggagtgcagtggcctgatctctgctccctgcaagctccgcctcccgggttcacgccattctcctgcctcagcctcccatagctgggactacaggcgcccgccaacacgcctggctaattttttgtatttttagtagagacagggtttcaccatgttagccaggatggtctcgatctcctgacctcgtgatgggcccgcctcggcctcccaaagtgctgggattaaggcgtgagccactgcgcccggcccaagagaataggggagccaaggaggaaatgtggaaacgcagttgtgtggcccagcacgagcctgggcgaccaccgggtgacatccgtcccacatcagggcggcctcccaggtcccataagggtagccccctcatctgcaggacagagggaagccagtcagggcccccccgacgttaggaccaggagaaatcaacaggagggcagcccgtcctctctcttggggcgcccacccggcccggctgagccctgccccacccaactccacagggctgttttgcctccccacggaaggcgggctgaggagacaaccagatcaggagagcaaggtcatgaaggaggggacctctccacacaggtgttccgtgggaccctcagcagctctggctctgcctcaggaggtcacctgccgccctgtgggagccgcagagcctgacgctcagccccaggccagctgcggccaggcctgcgggcccctggtgatggggttacgtggggtgcgggatacagctgagtgggaaccggaaacctattctctttttaacaaaaataatcttaggataagaattattttaacaacatataaaactgtttcaagccctcctccccagagctggcgctcagcagccctagcggctgctccttcaggcgaagggtggtttgcagatgtggggagggtgtctggggacgttgctgagctggctgcagaagggtggggatatcagggcacagtctccatgtgtgtgccaagccctggcccccacagcgctcgatggacctcagcaagctgcccagccctggcccaggtgccccgactgtgggactcagttgttctgagcacatttgactccacttttcctttaaaaatgaatgtcttgttcctgtgcattggtggcatcacagaccccagctggggcgcgatgtcaaaggtcgggacagctgtgccgggaggcagccacagggaagctcacacatcctgtcagtgtcaccttggtttgcaaaacccatatccccggtaaaatgaggccggacagaggggctgttaggacagcaaagcagcagtgtccagagacccctcaatccccaaaggtccgcaccctgtcctgcacaccctgggccacgccggccacacccctctgctgcaacaagctcatccctggacttctgggagaatgaacccgaggttggtttggggagacaggtgaggcggttggatctacagaacaacccaccatttctgggggccgcagaggatccatcacagacggatactggggagtaaacggcccaggccaggtgcccaggaaaggacggctgagcatgtggagcgagagggaggcaggtggacgctgcagaccccaggttcagtgcggcccctcggctgttcctcccctgtagggtttggacagacccacccccagccttgcccagctttcaaaggacaaaagggagcatcccccacctactctcaggtttttgaggaaacaaagatttgtggtaactgaaggtgttgggtcagtggccaggtgccgacactgagctgtgacccagaggggacgctgaggaagtgggcgtgagtggacatgtcaggtggttaccaggcactggttgttgatggtcggtggttgggtgtgggcagtcatcagtcatcaggtgtgctcaggggacaatctcccctcaaccgcacatgtgccactgttcagcggagctgactggtttctcctggtagagggccggctgtatcctgacagatgcctggtgagcaggggaagcaggacccagtggtcaacaggtgtctttaactgtcattgtgtgtggaatgtcgcagactcctccacgtggcgggaatgagctgtgtaaatacttcaataaagcctgacttcacatctgcaaaaaaaaaaaaaaaaaa

SEQ ID NO: 57217 - DNA, 5325 bp, Homo Sapiens; identical to SEQ ID NO: 30384

SEQ ID NO: 57218 - DNA, 2970 bp, Homo Sapiens
ggggtaaggagttcaaggcagcgcccacacccgggggctctccgcaacccgaccgcctgtccgctcccccacttcccgccctccctcccacctactcattcacccacccacccacccagagccgggacggcagcccaggcgcccgggccccgccgtctcctcgccgcgatcctggacttcctcttgctgcaggacccggcttccacgtgtgtcccggagccggcgtctcagcacacgctccgctccgggcctgggtgcctacagcagccagagcagcagggagtccgggacccgggcggcatctgggccaagttaggcgccgccgaggccagcgctgaacgtctccagggccggaggagccgcggggcgtccgggtctgagcctcagcaaatgggctccgacgtgcgggacctgaacgcgctgctgcccgccgtcccctccctgggtggcggcggcggctgtgccctgcctgtgagcggcgcggcgcagtgggcgccggtgctggactttgcgcccccgggcgcttcggcttacgggtcgttgggcggccccgcgccgccaccggctccgccgccacccccgccgccgccgcctcactccttcatcaaacaggagccgagctggggcggcgcggagccgcacgaggagcagtgcctgagcgccttcactgtccacttttccggccagttcactggcacagccggagcctgtcgctacgggcccttcggtcctcctccgcccagccaggcgtcatccggccaggccaggatgtttcctaacgcgccctacctgcccagctgcctcgagagccagcccgctattcgcaatcagggttacagcacggtcaccttcgacgggacgcccagctacggtcacacgccctcgcaccatgcggcgcagttccccaaccactcattcaagcatgaggatcccatgggccagcagggctcgctgggtgagcagcagtactcggtgccgcccccggtctatggctgccacacccccaccgacagctgcaccggcagccaggctttgctgctgaggacgccctacagcagtgacaatttataccaaatgacatcccagcttgaatgcatgacctggaatcagatgaacttaggagccaccttaaagggccacagcacagggtacgagagcgataaccacacaacgcccatcctctgcggagcccaatacagaatacacacgcacggtgtcttcagaggcattcaggatgtgcgacgtgtgcctggagtagccccgactcttgtacggtcggcatctgagaccagtgagaaacgccccttcatgtgtgcttacccaggctgcaataagagatattttaagctgtcccacttacagatgcacagcaggaagcacactggtgagaaaccataccagtgtgacttcaaggactgtgaacgaaggttttctcgttcagaccagctcaaaagacaccaaaggagacatacaggtgtgaaaccattccagtgtaaagcttgtcagcgaaagttctcccggtccgaccacctgaagacccacaccaggactcatacaggtgaaaagcccttcagctgtcggtggccaagttgtcagaaaaagtttgcccggtcagatgaattagtccgccatcacaacatgcatcagagaaacatgaccaaactccagctggcgctttgaggggtctccctcggggaccgttcagtgtcccaggcagcacagtgtgtgaactgctttcaagtctgactctccactcctcctcactaaaaaggaaacttcagttgatcttcttcatccaacttccaagacaagataccggtgcttctggaaactaccaggtgtgcctggaagagttggtctctgccctgcctacttttagttgactcacaggccctggagaagcagctaacaatgtctggttagttaaaagcccattgccatttggtctggattttctactgtaagaagagccatagctgatcatgtccccctgacccttcccttctttttttatgctcgttttcgctggggatggaattattgtaccattttctatcatggaatatttataggccagggcatgtgtatgtgtctgctaatgtaaactttgtcatggtttccatttactaacagcaacagcaagaaataaatcagagagcaaggcatcgggggtgaatcttgtctaacattcccgaggtcagccaggctgctaacctggaaagcaggatgtagttctgccaggcaacttttaaagctcatgcatttcaagcagctgaagaaagaatcagaactaaccagtacctctgtatagaaatctaaaagaattttaccattcagttaattcaatgtgaacactggcacactgctcttaagaaactatgaagatctgagatttttttgtgtatgtttttgactcttttgagtggtaatcatatgtgtctttatagatgtacatacctccttgcacaaatggaggggaattcattttcatcactgggagtgtccttagtgtataaaaaccatgctggtatatggcttcaagttgtaaaaatgaaagtgactttaaaagaaaataggggatggtccaggatctccactgataagactgtttttaagtaacttaaggacctttgggtctacaagtatatgtgaaaaaaatgagacttactgggtgaggaaatccattgtttaaagatggtcgtgtgtgtgtgtgtgtgtgtgtgtgtgttgtgttgtgttttgttttttaagggagggaatttattatttaccgttgcttgaaattactgtgtaaatatatgtctgataatgatttgctctttgacaactaaaattaggactgtataagtactagatgcatcactgggtgttgatcttacaagatattgatgataacacttaaaattgtaacctgcatttttcactttgctctcaattaaagtctattcaaaaggaaaaaaaaaaaaaaaa

SEQ ID NO: 57219 - DNA, 3163 bp, Homo Sapiens
atgacaccaagcaaagcctacttagtttagatctccagaaattggctggtggaaaaaaatcaaacatgaagattgcagttttgttttgtttttttctgcttatcatttttcaaactgactttggaaaaaatgaagaaattcctaggaagcaaaggaggaagatctaccacagaaggttgaggaaaagttcaacctcacacaagcacagatcaaacagacagcttggaattcagcaaacaacagtttttacaccagtagcaagacttcctattgttaactttgattatagcatggaggaaaagtttgaatccttttcaagttttcctggagtagaatcaagttataatgtgttaccaggaaagaagggacactgtttggtaaagggcataaccatgtacaacaaagctgtgtggtcgcctgagccctgcactacctgcctctgctcagatggaagagttctttgtgatgaaaccatgtgccatccccagaggtgcccccaaacagttatacctgaaggggaatgctgcccggtctgctccgctactgtctcctattctctactcagtggtatagcattaaatgatagaaatgaattttctggtgattcttcagaacaaagagaacctaccaatttacttcataagcaactgccacctcctcaggtgggaatggaccgaatagtaagaaaagaagcacttcaatctgaggaggatgaagaagtgaaagaagaagatacagagcaaaagagagagacccctgaatctagaaatcaggggcaactttacagtgagggggacagcagaggaggagacagaaagcagaggcctggagaggagaggaggctggcacaccagcaacaacgccaaggaagggaggaggaggaggatgaggaggaggagggtgaggagggtgaggaggatgaggaggacgaggaggacccggtaagaggagatatgttccgaatgccctctcgatccccgcttcctgctcctcccagaggcacactgcgcctgccaagcgggtgctctctgtcctacaggaccatcagctgcatcaacgccatgcttacccagataccaccgctgacagcaccacagataacaagtctggagctcactggcaattccatcgcctccatcccagatgaagcatttaatggattaccaaatttggaaaggcttgatctgagtaaaaataatatcacttcttcaggcataggtccaaaagcattcaagcttctgaagaagttaatgcgtttgaatatggatggaaataatttgatacagattccttcacaattgccatctacattagaagaacttaaagtcaatgagaacaatcttcaggctatcgatgaagaaagtttatcagacttaaatcagttggtcaccttagaattggaaggaaacaatctcagtgaagccaatgtcaatcctttagctttcaaacctttgaagagcctagcctacttgcgtctgggaaaaaataaatttagaattataccgcagggtcttcctggttctattgaggaattatacctagaaaataaccaaattgaagaaataactgaaatttgtttcaatcataccagaaagatcaatgtcattgtactacgttataacaaaattgaagaaaataggattgctcctttagcctggataaatcaagaaaatctagaatccattgatctctcctacaacaagctctatcacgtcccgtcctatctacccaagtccttgctgcacctagtactccttgggaaccagattgaacggatccctggctatgtgtttggccacatggaaccaggcctggaatacttgtacctgtcatttaacaaacttgctgatgatggcatggaccgtgtctccttctatggggcatatcattctctgagagaattatttctggatcacaatgacttaaaatctataccacctgggatacaagaaatgaaagcactacattttctgaggctgaacaacaacaagatacggaacattcttccagaagaaatttgcaatgctgaagaggatgatgactcaaatctggaacatcttcatcttgaaaacaattatattaaaattagagaaataccatcttacacattttcatgcataagatcatactcaagtatcgttcttaaaccacaaaacatcaagtaattccaagttttcctttgctgtttataaactttactcatgtatttgtagtagctgcatttgtcattaataagagagacataatcctcctgttatactcagtatcattatatgctagtcaacctgattcactaacacacagatgaacaaccaaaatatacctaaaaggtatagtctctaggagttttattaatagtaaaggtaaaatctctcagtttcctacctctagaaagaggccatctcactagaataggatattatgcatactgagctagaccagaagagtctggaacaaaataaacacagcctttataatcaacttgaatactggtgttagctgagaactctgtaagtccctttaaaaattatgtatcttttggttcaagattaagaagcataatgacaacaaaaaaagcaggcagaatttatgaataagtgttgtttattattaaaacaataatttgttaatttcttataaggtcctgtgctataattactggtataaatataactgaatattggggtagctttcatttcttccattaattacatgtgtaaaattaaaacactactgtaatgttaatttcctggttttgaaaatcatattatggttatgtacattgttaacattaaggaaagctggcagaagggtgtgcataaattctatactctttttgaaacttttctataattctaaaattattttttaaagttaaacagtatattaagattaccttcactattcctcactcaagattaagacattttttgaaaagcagtagagtttgcttaaaatacaaattaattattcttgactataaccttgtaaaggtaaatctaatgtataaatttttgaaaaattttgcaccactggtcatagcatctatctcctttgccttaatttactgaaatacatcattttattcggttcaattgaaataaagctatgtctttactatgtattggccctaccaaaatcatatattaaaattttctaacat

SEQ ID NO: 57220 - DNA, 6148 bp, Homo Sapiens
atgggccccgccgccagggggcgcagcgctcccttcccggccgttccacggcggttcgcggttcccgctgcccaggagctggaggcgggcccggcgccttgggtgtgcacccgggctggcgcgaggcctggccggccggccgcaaagctgaagcctggggcgctcgccgctcctcttctaaaaagtatcactgtgaaagtggagacagaggctgaagatgctgctctggactgctccgtgaattccaggacttctgagaagcactctgtggacagcgtcctcactgccctgcaggactccagcaaacgaaagcagctggtcagcgatggcctgctagactctgtccccggcgtgaagaggaggcggctgatccccgaggctctcctagcaggcatgcggaaccgtgagaacagctcgccctgccaaggcaatggtgagcaggccggcaggggcaggagcctgggcaatgtgtggcctggagaggaggagccctgcaacgatgccaccaccccttcctacaagaagcctctgtatggcatctcgcacaagatcatggagaagaagaatcctccctcgggggacctgctaaacgtgtacgagctctttgagaaggcaaacgccagcaacagcccctcgtcactgcggctcctgaatgagccacagaagcgggactgtggcagcaccggggcaggcactgacaacgaccccaacatctacttcctgatccagaagatgttctacatgctgaacaccctcacgtccaacatgtcccagctgcacagcaaggtggacctgctctcccttgaggtgagccgcatcaagaagcaggtgagccccactgagatggtggccaaattccagccgccccctgagtaccagctcacagccgcagagctcaagcagatcgtggaccagagcctgtcagggggggacctggcctgccgcttgctggtgcagctcttccccgagctcttcagcgacgtggacttctcccggggctgcagtgcctgtggctttgcggccaagcgcaagctggagtcgctgcacctgcagctcatccgcaactatgtggaggtctactacccctcggtgaaggacacggctgtgtggcaggccgagtgcctgccccagctgaacgacttcttcagccgcttctgggcccagcgggaaatggaggacagccagcccagcggccaggtcgccagcttctttgaggcagagcaggtggaccccggccacttcctggacaacaaagaccaggaggaggccctgtctcttgaccggagcagcaccatcgcctcagaccacgtggtggacacgcaggacctcactgagttcctggacgaagcctcctcaccaggcgagtttgccgtcttcctcctccaccggctcttccccgagctcttcgaccaccgcaagctgggtgaacagtacagctgctacggggacggtggaaagcaggagctggacccgcagcggctgcagatcatccgcaactacacggagatctacttccctgacatgcaggaggaggaggcctggctgcagcagtgtgcccagcgcatcaacgacgagctcgagggcctggggctggacgcgggcagtgaaggcgaccccccgcgtgatgactgctacgactcctccagtctgcccgacgacatctcagtggtcaaggtggaggacagcttcgagggcgagcggccgggtcgccgctccaagaagatctggctggtgcccatcgacttcgacaagttagagatcccccagcctgacttcgaggtgcccggtgccgactgcctgctcagcaaggagcagctacgcagcatctacgagagcagcctgtccatcggcaacttcgcctcgcgcctgctggtgcacctgttccccgagctcttcacgcacgagaacctgcgcaagcagtacaactgcagcggctccctgggcaagaagcagctggacccctcccgcatcaagctcatccgccactacgtgcagctgctctacccacgcgccaaaaacgaccgcgtctggaccctggagttcgtgggcaaactggatgagcgctgccggcgccgggacacggagcaaaggcgctcctaccagcagcagcgcaaggtccacgtgccgggccctgagtgcagagacttgaccagctatgcaatcaaccccgagaggttccgggaggagtttgaggggcccccactgccccccgagaggagcagcaaggacttttgcaagatccccttggacgagctggtggtcccctcgcctgacttcccggtgccttctccctacctgctgtctgacaaggaggtgcgtgagatcgtgcagcagagcctctccgtgggcaactttgccgcccggctcctcgtccgcctgtttcccgaactcttcaccgccgagaacctccggctgcagtacaaccattccggggcttgcaacaagaagcaactggaccccacgcggctgcggctcatccgccactacgtggaagccgtctacccggtggagaagatggaggaggtgtggcactacgaatgtatccccagcatcgatgagaggtgccgccgccccaacaggaaaaaatgcgacatcctcaagaaagcaaagaaagtggagaagtgaaggcccgtgacctgcccagagattcggggtcaccagaggctgagcgatgggcacccttgggactgagcaatacttgggagcacgcctatggcatccacagacaggcaccttatgtccgtggggagtggcttactacatttgcacacgtaaacacccacccaaccgcaagaaagaagccttgagtttggtctcttgtacttacaacttctgtcctatgtgccccggcggggcagcctgagtgtggggagagcaagctgtgagggcagggaccagaggttaggggtcctctctccctggttgtgccctccccagcccctcacagcttataatgcaaacccagcaactctcttgcccctcttcccatattttacatcttccattttgacccatttttttttaattaaaaagaaacccttaaaaaaaatcattgggctctttgggggccattttacttagaaaaaaatctctttaaaagtgccatgttcgtgcacagtggctaatcatagcttcaggtggcatggatactgattttactgaccttgttttttacatctgattttggaagagtcaagatgccccttggatggcagtagaggggatggaatagtgcgaagtcctttacgaccacatgcaagttttcccttctgctctggtgccagggaaggcttccgttcagcttggcctgtccttcaggcgcgttggtagaatgttgtgtcactctttaggcgagaacactggatgatgatgatatgaatgtagacagccgtggaaacacgttcgcagtgtctccatctgagccgtgtccttccgctgcccccattccttctccatacatggttgctggttggagggagtggacatgtttccttggaaaacagtgcaggggcttttggcttcttgttagatttaagggtgggcctctttgagctcaccatgaactgtttacttttccgtgtgtgtatttgtacaaaatccaggttccgggagctttgtggtgacttccccagacctcagtgttagctactccaggcagtactacatcctcattcctcagggcgggcccaggtctgggcccctcttggggataccatgcattggaaggacacaggccattttagatggggtacacatgtcccttcccagggtccactcagaactttcctcttggactctctagaaggtcctgctgtcctatacctggccaccccctgccttggggggcacatgtcttcgttccctcccgactgggaatgtcaggctcctgcaggccagctgcatgctctccaggagcaccaactgggaaatcccctgacaggtaaagtcctttaaaatgatacttttacctacctaactctgggggccaaatgcttaagagggaaaggaaacagtcgaatgcaaacagtgtgtcataccagagtcctggaaaatttattgaatcacacagggtagtcatagaacccctgtgggatggcttaatattttgctactttaaaatgcagagataacagaaacaatctggattttcttcattcagctgataagaacttcagttccagtggctgtatgacataattttgcctgtacccaggagcattttttaaaatacaggattttaaaagcaatgttaagttgctgatctaactagtaaatttgctcctaagtgtcatttacagattatttctgttgaaactgcaaacagatttagaaaggcacagggactgaatgactctctgtcttacacagctactcatgcacacacgcactgcttactaaaagctgaagtgagatgaagggggcctacacgaataacaagttcaacttctttgtgcctggaaaggagggactggagcagccaggagactcactttcccccctcgcttgggcccttctctatgccttagtctctccagcacatgcacacagcatgcacacacacgcaccctacccaaagacagctgtggccctctcccaccacctcccccttcccaccgctggttgttgggggctggaggcgggaggtcccatggaatttgttctggtttctaggatgtaaacgaggactccaagccatgaattgccctgctttctagagggtggaatgttgaccctgcaactttagaagcacaatcatttattaataatttttttgaaactcccatctacccctgttagagaaatcaacaggttctaggaattaaatatgtctctttgtaacccagagcatgttcaatttttggaaaccgtatttcagtgattttcttaataccttacatgtgtagggcatcttcccccagaatcttacagtccctttctgtgaagagaagtggacacacgtgggaactctcaccatctctggactgtcgtcaggaaacgcctgcaggtccttgccctgtctgtatggtgtcctcacttctccatccatacaggtggctccagtgggcatttttttattttaaattttttacatgaagcaatagaagtacaaaatacttattttttcaaaatttaatgtgttccatgaaacctgttggcagtcgctttccttcccccacatctaaattctttggtttttagttgtttgttttttggatttttttttttttttttttggccttgtatcccaaggactaaaagattagcacagacacgttttgatgttgaatgaactagtaagtcacagtaggtggtagtcttcattgatttctctgtaagtttttaaagaatgtatgaagatagtcacgaatgtactgagtgttcgcatcccccttcagttcaccttggctgtgtctacaggacaacaaatgtttgacagggaataaagtcgtgtctggtgtcatttgcgctagcgtgcccctcccctttcggtgttggctccaaaccttcctttccttttatgtttgtggggagtggggaaccacatcagcagcaatcatcaaccaaccaaccaatgggatctacttagtggtgaatagattggctatttaattggtaaaagttgctggtctgaccacaccacagcatgaccactgggttcatttagagatggcctccgtttccaacgttccccacaaatgtttgcttctttcccagtcaagaggggatctcgagactcccgagtggaggtcgtgagcttgcaccccgcctggctgtgtagatcgactgtatagatacatgaagtgggggtgagggccaaggggctattactgctgttgggaaatacttgcctctcgtagatccagccttaatgtttttctgacatcctagtaatagcagaccctgcacaaagtggatatcagacttaatactgtgaggagacaaaataatgagaatagttttaccaaagataatgaaatctcgcatcatgtctgcattttaccatagattggagtgcatccttaggaaactgaatgtaacaaaaacccaggacatttttggaaattgtatgctctctagcaactttgtgtgaatttttatacaaacactgttttatgagttatataaaatgttataaaaatagaaaaac

SEQ ID NO: 57221 - DNA, 5319 bp, Homo Sapiens
ggctgggctgcgaatagcgtgttcctctccggcggaacacacacacccggccttggggctgtctcctgaagctccctcctccacggagagcgctgagcgccgccgggaattccatcccaccgtgggcacgcagtctttggaggtcccgggcgcagcacgctcggtgtccccacactgcagcaagacagagaccccgcgggaaccttgagcttggaacaacccttgagcctctgcagtcggaagagtgggcgcagcagcccagcggaggccaggcgcgcaacctcgggcgccggggcaaggagagagtgcagggaggcgcagctcaggcgcccggctcaggagcgggaggaagttctcgcggcgccgggagcgcggtggacgcgccctgggcgcacgcccaggcagccttctccctggccctcgggactgtcctcgggcggcaaggaggagcttgctggagtcttagaggccatccagagccagcgagcaggagcgctgcgtctcccgcctcagctaggaagggggagtggcgctggcaggctggagctgggaacccagcgagcgcctgaccttcctcctcctcttcctgaccctcttcgcgtcttgggctccggaggaaggttctagcggctgcaggaggtccccagacccattttcctagaaggctggtgatggatctgctgctcctgccgccgccggggcacttggagcgcaccggcggcgcgtgagctgggctttgctctccaccgccctgggcaaaccccgggccagccccgcctggcacctttgcctgagtccctttcggttcccgacccaaagccaccagcgtccagggagggaggaggaggtggtcctcaggtgcagccccgccgagatgtccgcgcagagcctgctccacagcgtcttctcctgttcctcgcccgcttcaagtagcgcggcctcggccaagggcttctccaagaggaagctgcgccagacccgcagcctggacccggccctgatcggcggctgcgggagcgacgaggcgggcgcggagggcagtgcgcggggagccacggcgggccgcctctactccccatcactcccagccgagagtctcggccctcgcttggcgtcctcttcccggggtccgccccccagggccaccaggctaccgcctcctggacctctttgctcgtccttctccacacccagcaccccgcaggagaagtcaccatccggcagctttcactttgactatgaggttcccctgggtcgcggcggcctcaagaagagcatggcctgggacctgccttctgtcctggccgggccagccagtagccgaagcgcttccagcatcctctgttcatccgggggaggccccaatggcatcttcgcttctcctaggaggtggctccagcagaggaagttccagtccccacccgacagtcgcgggcacccctacgtcgtgtggaaatccgagttggagttgtatgatcttcagatcttaggcacaaaaccaccgatgaattccgatacacatcgtaactttgaccccaccgcaacccttagaaatcagggtgatttcacctggaacagcatgtcaggccgcagtgtgcggctgaggtcagtccccatccagagtctctcagagctggagagggcccggctgcaggaagtgcctttttatcagttgcaacaggactgtgacctgagctgtcagatcaccattcccaaagatggacaaaagagaaagaaatctttaagaaagaaactggattcactaggaaaggagaaaaacaaagacaaagaattcatcccacaggcatttggaatgcccttatcccaagtcattgcgaatgacagggcctataaactcaagcaggacttgcagagggacgagcagaaagatgcatctgactttgtggcttccctcctcccatttggaaataaaagacaaaacaaagaactctcaagcagtaactcatctctcagctcaacctcagaaacaccgaatgagtcaacgtccccaaacaccccggaaccggctcctcgggctaggaggaggggtgccatgtcagtggattctatcaccgatcttgatgacaatcagtctcgactactagaagctttacaactttccttgcctgctgaggctcaaagtaaaaaggaaaaagccagagataagaaactcagtctgaatcctatttacagacaggtccctaggctggtggacagctgctgtcagcacctagaaaaacatggcctccagacagtggggatattccgagttggaagctcaaaaaagagagtgagacaattacgtgaggaatttgaccgtgggattgatgtctctctggaggaggagcacagtgttcatgatgtggcagccttgctgaaagagttcctgagggacatgccagacccccttctcaccagggagctgtacacagctttcatcaacactctcttgttggagccggaggaacagctgggcaccttgcagctcctcatataccttctacctccctgcaactgcgacaccctccaccgcctgctacagttcctctccatcgtggccaggcatgccgatgacaacatcagcaaagatgggcaagaggtcactgggaataaaatgacatctctaaacttagccaccatatttggacccaacctgctgcacaagcagaagtcatcagacaaagaattctcagttcagagttcagcccgggctgaggagagcacggccatcatcgctgttgtgcaaaagatgattgaaaattatgaagccctgttcatggttcccccagatctccagaacgaagtgctgatcagcctgttagagaccgatcctgatgtcgtggactatttactcagaagaaaggcttcccaatcatcaacaagttctgtgcttccggctgcagtgcaggcctgcccacagtaccctgccagcatgtttacgccctgacctggagggaccagctaaggaagccctgacatgctgcagtcggaagtttccttttccgtgggagggaggcattcatctacagactccaacaaggcctccagcggagacatctccccttatgacaacaactccccagtgctgtctgagcgctccctgctggctatgcaagaggacgcggccccggggggctcggagaagctttacagagtgccagggcagtttatgctggtgggccacttgtcgtcgtcaaagtcaagggaaagttctcctggaccaaggcttgggaaagatctgtcagaggagcctttcgatatctggggaacttggcattcaacattaaaaagcggatccaaagacccaggaatgacaggttcctctggagacatttttgaaagcagctccctaagagcggggccctgctccctttctcaagggaacctgtccccaaattggcctcggtggcaggggagccccgcagagctggacagcgacacgcagggggctcggaggactcaggccgcagcccccgcgacggagggcagggcccaccctgcggtgtcgcgcgcctgcagcacgccccacgtccaggtggcagggaaagccgagcggcccacggccaggtcggagcagtacttgaccctgagcggcgcccacgacctcagcgagagtgagctggatgtggccgggctgcagagccgggccacacctcagtgccaaagaccccatgggagtgggagggatgacaagcggcccccgcctccatacccgggcccagggaagcccgcggcagcggcagcctggatccaggggcccccggaaggcgtggagacacccacggaccagggaggccaagcagccgagcgagagcagcaggtcacgcagaaaaaactgagcagcgccaactccctgccagcgggcgagcaggacagtccgcgcctgggggacgctggctggctcgactggcagagagagcgctggcagatctgggagctcctgtcgaccgacaaccccgatgccctgcccgagacgctggtctgagcccgcacccagccgagccccccctgccccgagccccccgccctccagcccaggggggaccgtgggtggtggccactggcacacttagtgttcttctttcacacttctcaaaagtgacacaagagaaatccagttcacctacagaggtagagcactcacgcccccgccattgagaataaggttccattgcgtagccagccttaggaaaaacaaacagaacccaaaccagatggcaatgtccaatctaaaaacgtccctcttggctctataatataagatacaactcttgcttggtatagcctaaccgtatttatgtgtcttcggttttgactattgtgtattctgtaacagattatgtataatcatatatgatatattcacaaagagaaaacaaaaggaacttttaaaaaaaaaatcacttcacttatattaagcaatgagatatactaaacaatgagattctatagaatgttctagaatgtgcacaagcgggtttctgtgcttttgccatagctttataactggggataacccttccttcgataccaaacactaacaagaggaagcagaatatgagaagccatatttttacataggagtcagatacaaaaagaaaaatcactgaatgcttttagatattgaatacgttttcaggaaaatgctaaatctgatagattacgaaatatatttttagaacttgtttagaaaggattcagttaaccaaacaagaaaaaggcagtgcctcacaaagaaattaagaagttgtccgtcccacgttacatcaaattcagttttatataggccatatataatatatatttataatgtataatttttatgtatttttcaaaactacaaactggaatccaactataaagtgtttaagaatctacacagaatattcaaattatagaacatgttttttccctttgccccataatcagtatttgccaaattacatgcaattccttaaaaactaaatcacattggtaaaaggcctacagctttgtacttacattgtgccaaaggctgaggaaatgttttctttcgaatttttatgtgtattgtaaaatgttctaccgtactttagtagtttgaagttttcaagtgcataactatttttgaccagcagaaggcgatacgcttcagtattttatgcaattttttttcacttcgaagggaaagtgtattataaaaaaagattttttttttttaaaacatgctactcttaattttcatgttggtgatgaaattcccagtggtgtttcttaaggttctatcttgtgccatgatgaataaaaagttaagcaaaaaaaaaaaaaaaaaaaaaaaaa

SEQ ID NO: 57222 - DNA, 2015 bp, Homo Sapiens
actgcgaagcggcttcttcagagcacgggctggaactggcaggcaccgcgagcccctagcacccgacaagctgagtgtgcaggacgagtccccaccacacccacaccacagccgctgaatgaggcttccaggcgtccgctcgcggcccgcagagccccgccgtgggtccgcccgctgaggcgcccccagccagtgcgcttacctgccagactgcgcgccatggggcaacccgggaacggcagcgccttcttgctggcacccaatagaagccatgcgccggaccacgacgtcacgcagcaaagggacgaggtgtgggtggtgggcatgggcatcgtcatgtctctcatcgtcctggccatcgtgtttggcaatgtgctggtcatcacagccattgccaagttcgagcgtctgcagacggtcaccaactacttcatcacttcactggcctgtgctgatctggtcatgggcctggcagtggtgccctttggggccgcccatattcttatgaaaatgtggacttttggcaacttctggtgcgagttttggacttccattgatgtgctgtgcgtcacggccagcattgagaccctgtgcgtgatcgcagtggatcgctactttgccattacttcacctttcaagtaccagagcctgctgaccaagaataaggcccgggtgatcattctgatggtgtggattgtgtcaggccttacctccttcttgcccattcagatgcactggtaccgggccacccaccaggaagccatcaactgctatgccaatgagacctgctgtgacttcttcacgaaccaagcctatgccattgcctcttccatcgtgtccttctacgttcccctggtgatcatggtcttcgtctactccagggtctttcaggaggccaaaaggcagctccagaagattgacaaatctgagggccgcttccatgtccagaaccttagccaggtggagcaggatgggcggacggggcatggactccgcagatcttccaagttctgcttgaaggagcacaaagccctcaagacgttaggcatcatcatgggcactttcaccctctgctggctgcccttcttcatcgttaacattgtgcatgtgatccaggataacctcatccgtaaggaagtttacatcctcctaaattggataggctatgtcaattctggtttcaatccccttatctactgccggagcccagatttcaggattgccttccaggagcttctgtgcctgcgcaggtcttctttgaaggcctatgggaatggctactccagcaacggcaacacaggggagcagagtggatatcacgtggaacaggagaaagaaaataaactgctgtgtgaagacctcccaggcacggaagactttgtgggccatcaaggtactgtgcctagcgataacattgattcacaagggaggaattgtagtacaaatgactcactgctgtaaagcagtttttctacttttaaagacccccccccccccaacagaacactaaacagactatttaacttgagggtaataaacttagaataaaattgtaaaaattgtatagagatatgcagaaggaagggcatccttctgccttttttatttttttaagctgtaaaaagagagaaaacttatttgagtgattatttgttatttgtacagttcagttcctctttgcatggaatttgtaagtttatgtctaaagagctttagtcctagaggacctgagtctgctatattttcatgacttttccatgtatctacctcactattcaagtattaggggtaatatattgctgctggtaatttgtatctgaaggagattttccttcctacacccttggacttgaggattttgagtatctcggacctttcagctgtgaacatggactcttcccccactcctcttatttgctcacacggggtattttaggcagggatttgaggagcagcttcagttgttttcccgagcaaaggtctaaagtttacagtaaataaaatgtttgaccatg

SEQ ID NO: 57223 - DNA, 1789 bp, Homo Sapiens
ggttcaggaacctgctggttctgatacataaatcagacagcctctgctgcatgacacgaagcttgcttctgcctggcatctgtgagcagctgccaggctccggccaggatcccttccttctcctcattggctgatggatcccaaggggctcctctccttgaccttcgtgctgtttctctccctggcttttggggcaagctacggaacaggtgggcgcatgatgaactgcccaaagattctccggcagttgggaagcaaagtgctgctgcccctgacatatgaaaggataaataagagcatgaacaaaagcatccacattgtcgtcacaatggcaaaatcactggagaacagtgtcgagaacaaaatagtgtctcttgatccatccgaagcaggccctccacgttatctaggagatcgctacaagttttatctggagaatctcaccctggggatacgggaaagcaggaaggaggatgagggatggtaccttatgaccctggagaaaaatgtttcagttcagcgcttttgcctgcagttgaggctttatgagcaggtctccactccagaaattaaagttttaaacaagacccaggagaacgggacctgcaccttgatactgggctgcacagtggagaagggggaccatgtggcttacagctggagtgaaaaggcgggcacccacccactgaacccagccaacagctcccacctcctgtccctcaccctcggcccccagcatgctgacaatatctacatctgcaccgtgagcaaccctatcagcaacaattcccagaccttcagcccgtggcccggatgcaggacagacccctcagaaacaaaaccatgggcagtgtatgctgggctgttagggggtgtcatcatgattctcatcatggtggtaatactacagttgagaagaagaggtaaaacgaaccattaccagacaacagtggaaaaaaaaagccttacgatctatgcccaagtccagaaaccaggtcctcttcagaagaaacttgactccttcccagctcaggacccttgcaccaccatatatgttgctgccacagagcctgtcccagagtctgtccaggaaacaaattccatcacagtctatgctagtgtgacacttccagagagctgacaccagagaccaacaaagggactttctgaaggaaaatggaaaaaccaaaatgaacactgaacttggccacaggcccaagtttcctctggcagacatgctgcacgtctgtacccttctcagatcaactccctggtgatgtttcttccacatacatctgtgaaatgaacaaggaagtgaggcttcccaagaatttagcttgctgtgcagtggctgcaggcgcagaacagagcgttacttgataacagcgttccatctttgtgttgtagcagatgaaatggacagtaatgtgagttcagactttgggcatcttgctcttggctggaactgataataaaaatcagactgaaagccaggacatctgagtacctatctcacacactgaccaccagtcacaaagtctggaaaagtttacattttggctatctttactttgttctgggagctgatcatgataacctgcagacctgatcaagcctctgtgcctcagtttctctctcaggataaagagtgaatagaggccgaagggtgaatttcttattatacataaaacactctgatattattgtataaaggaagctaagaatattattttatttgcaaaacccagaagctaaaaagtcaataaacagaaagaatgattttgagaaa

SEQ ID NO: 57224 - DNA, 3568 bp, Homo Sapiens
aatttacatccattcatgaatctgtgacgtcagcaagcctttgggctcctttgcggtgggctggaggattgtgtgggtggaatccccctcccctttatttttccaattctgcaaggcttttaaaattcaccttacatcttttcaaagcaagaaaatggaacagcatgtgtaggaattcttcgttgttgttttggagccctctcttaagtcagaactctgtcccaaaaatcttctgagtgtcatctcaggactttggttatactcatggcacgatggccaactttcaggagcacctgagctgctcctcttctccacacttacccttcagtgaaagcaaaaccttcaatggactacaagatgagctcacagctatggggaaccacccttctcccaagctgctcgaggaccagcaggaaaaggggatggtacgaacagagctaatcgagagcgtgcacagccccgtcaccacaacagtgttgacgagcgtaagtgaggattccagggaccagtttgagaacagcgttcttcagctaagggaacacgatgaatcagagacggcggtgtctcaggggaacagcaacacggtggacggagagagcacaagcggaactgaagacataaagattcagttcagcaggtcaggcagtggcagtggtgggtttcttgaaggactatttggatgcttaaggcctgtatggaatatcattgggaaggcatattccactgattacaaattgcagcagcaagatacttgggaagtgccatttgaggagatctcagagctgcagtggctgggtagtggagcccaaggagcggtcttcttgggcaagttccgggcggaagaggtggccatcaagaaagtgagagaacagaatgagacggatatcaagcatttgaggaagttgaagcaccctaacatcatcgcattcaagggtgtttgtactcaggccccatgttattgtattatcatggaatactgtgcccatggacaactctacgaggtcttacgagctggcaggaagatcacacctcgattgctagtagactggtccacaggaattgcaagtggaatgaattatttgcacctccataaaattattcatcgtgatctcaaatcacctaatgttttagtgacccacacagatgcggtaaaaatttcagattttggtacatctaaggaactcagtgacaaaagtaccaagatgtcatttgctggcacggtcgcatggatggcgccagaggtgatacggaatgaacctgtctctgaaaaagttgatatatggtcttttggagtggtgctttgggagctgctgacaggagagatcccttacaaagatgtagattcttcagccattatctggggtgttggaagcaacagcctccaccttccagttccttccacttgccctgatggattcaaaatccttatgaaacagacgtggcagagtaaacctcgaaaccgaccttcttttcggcagacactcatgcatttagacattgcctctgcagatgtacttgccaccccacaagaaacttacttcaagtctcaggctgaatggagagaagaagtgaaaaaacattttgagaagatcaaaagtgaaggaacttgtatacaccggttagatgaagaactgattcgaaggcgcagagaagagctcaggcatgcgctggatattcgtgaacactatgagcggaagcttgagcgggcgaataatttatacatggaattgagtgccatcatgctgcagctagaaatgcgggagaaggagctcattaagcgtgagcaagcagtggaaaagaagtatcctgggacctacaaacgacaccctgttcgtcctatcatccatcccaatgccatggagaaactcatgaaaaggaaaggagtgcctcacaaatctgggatgcagaccaaacggccagacttgttgagatcagaagggatccccaccacagaagtggctcccactgcatcccctttgtccggaagtcccaaaatgtccacttctagcagcaagagccgatatcgaagcaaaccacgccaccgccgagggaatagcagaggcagccatagtgactttgccgcaatcttgaaaaaccagccagcccaggaaaattcaccccatcccacttacctgcaccaagctcaatcccaatacccttctcttcatcaccataattctctgcagcagcaataccagcagccccctcctgccatgtcccagagtcaccatcccagactcaatatgcacggacaggacatagcaacctgcgccaacaacctgaggtatttcggcccagcagcagccctgcggagcccactcagcaaccatgctcagagacagctgcccggctcgagccctgacctcatctccacagccatggctgcagactgctggagaagttctgagcctgacaagggccaagctggtccctggggctgttgccaggctgacgcttatgacccctgccttcagtgcaggccagaacagtatgggtccttagacataccctctgctgagccagtggggaggagccctgacctttccaagtcaccagcacataatcctctcttggaaaacgcccagagttctgagaaaacggaagaaaatgaattcagcggctgtaggtctgagtcatccctcggcacctctcatctcggcacccctccagcgctacctcgaaaaacaaggcctctgcagaagagtggagatgactcctcagaagaggaagaaggggaagtagatagtgaagttgaatttccacgaagacagaggccccatcgctgtatcagcagctgccagtcatattcaacctttagctctgagaatttctctgtgtctgatggagaagagggaaataccagtgaccactcaaacagtcctgatgagttagctgataaacttgaagaccgcttggcagagaagctagacgacctgctgtcccagacgccagagattcccattgacatatcctcacactcggatgggctctctgacaaggagtgtgccgtgcgccgtgtgaagactcagatgtctctgggcaagctgtgtgtggaggaacgtggctatgagaaccccatgcagtttgaagaatcggactgtgactcttcagatggggagtgttctgatgccacagttaggaccaataaacactacagctctgctacctggtaatgaaggaatacacatcctgaagatctcgtgactatactggcatttcagatccaccccacccccagactcatcccactctctcccagcattttgtctgggaagagagactaccccatctttaccaccccctagaaatgagctgcaataacaggaacatgagacttcgcaaatctctggaaaataatatccaaatgaaattaagtctcactgaacatttcaatcaagaatggcagggatctattttattgaatattctagctactgtaacattgatatttatttttgtttgacattttaacactttgtactgcaaagagtgaactatatatgagatagagagacaataatttcttgcaaaaaaaaaaagagataaaagaaagaacaaaaaaaaaaaa

SEQ ID NO: 57225 - DNA, 2732 bp, Homo Sapiens; identical to SEQ ID NO: 32014

SEQ ID NO: 57226 - DNA, 1776 bp, Homo Sapiens
ggagatgcccgttcgctcgggatcaggaacggtgagctcctgggaccgcaatgccctgagaacgcagccgggtgctgagcctccggagtccggtagctgaatgaaatacgcagggatcaccagccggacccaaatcttgcgtccctgccagcatcctggagtcctaagaggcagggattggagcggacaggatctcagaactctggtcccgggcgcacaacggcggagtcgctgttcctggtgctgaaacgctcagtcctggaagaacgtggccgcctgcccgcctggtaccgcgccgcggccgctgcggggaactgtccagtgctgaaaacggatgcggcccggcccgcagagctcagacccaagcctgccgcacccagcggagctcgaaccgagctcctggaagcgctgacgcagagcgcagggagagccggagcggcgagctccaagcctggcatggacctgcagagacccgattcctaccagggaggagctggccctgacttcaacgaccacgtcctgcataagaccatcctggtgggtgacagtggtgtgggaaagacgtctctgctggttcagttcgatcagggcaagttcatccccggctccttctcggccactgtgggcatcggattcacgaacaaggtggtgactgtggatggcgtgagagtgaagctgcagatctgggacaccgctgggcaggaacggttccgaagcgtcacccatgcttattacagagatgctcaggccttgcttctgctgtatgacatcaccaacaaatcttctttcgacaacatcagggcctggctcactgagattcatgagtatgcccagagggacgtggtgatcatgctgctaggcaacaaggcggatatgagcagcgaaagagtgatccgttccgaagacggagagaccttggccagggagtacggtgttcccttcctggagaccagcgccaagactggcatgaatgtggagttagcctttctggccatcgccaaggaactgaaataccgggccgggcatcaggcggatgagcccagcttccagatccgagactatgtagagtcccagaagaagcgctccagctgctgctccttcatgtgaatcccagggggcagagaggaggctctggaggcacacaggatgcagccttcccccacccatgccctttcctttaacttctcaaacagataccagggcctaaactgctttacctcccctcctactgagtcaggttaggtggtgggaggtcacccatttccgagttaaaccaatgcaatatgagtaaaacaaagtcatgtgggtatgtctggggtagagagaggggtagcaagttcatgtgtcctccttggtcacatatctcccaaagctccgatccctgccatgggaagtggacaggaaacatgaggtcatgacctgcaggcatctttactgcagctctgccggcctggagggggagagggggaggaagaagtatgcgctgcacatttctgaggctactgcatttgctttcaaggcagaaatcttgctctgagcagtcagcggctccagtttgggcccgataaggaagttctccgtggcctccctcaggcagagcagggaggaggctgacattgccagtctcttctggggcccaaggcaggttgcaggagatccaatcccatagacagctctgggcctcttgcatttgagtttttcagaattaaactgcagtattttggaaagcaaaaaaaaaaaaaaaaaaaaaaaaaaaaaaaaaaaaaaaaaaaaaaa

SEQ ID NO: 57227 - DNA, 7350 bp, Homo Sapiens
tgtgcgtcgcgctctcgccctcctcttcccgctgcagtgtctatggagcgaggctacgtttcattgccgccctggcttaacccttccggcgcctaaaaggacggccggccggccggtcccttgcaccaggaagaagtcttagcagccagcgggccctggtcaggaaactctaaggtacaaggaaaacagttgaggaaggagccagagcgctccggtttggtcctcgggcttcgctggggcggggcgcaggcgttggctttaagaaaggggaggggacagtgcaatccgggttgcccgcggattcggccaaggaatcttccgctcgctccggagcgaggagcctgtaaagaggctgttcccagctccagctctaacctcgcctacaccttgggcgggcccaatgtcacgtttgcaattgctcaggaaggatccggcccgtctccggaggcaagtcgggctgcggtttttgctgcttatctgggaaggcgatgcctaagggacatgctgcttgctaggcagcaccctgccgggatccgactgcgatagttagctctccctggccctgaagccatcgccggggcgcctgttctctgtccggaccagccagcgctcctcaggagtctcactgaaacagaaccatgggtcatcccccgctggagttcagcgactgctacctggacagccccgatttccgcgagaggctcaagtgttatgagcaggaactggagaggaccaacaaattcatcaaagacgtaatcaaagacggcaacgcgcttatcagcgctatgagaaattattcttctgctgttcagaaattttcccagacgctgcagtcatttcagtttgatttcattggagacactctgactgatgatgaaattaacatcgctgaatccttcaaggaatttgctgaattgctcaacgaggtagaaaatgagaggatgatgatggtacacaatgctagtgatttgctgattaaacccttggaaaatttccggaaggaacaaataggcttcaccaaggagcggaaaaagaaatttgaaaaggatggtgagaggttttattctttactggatcggcacttacacctgtcttcaaaaaagaaagaatctcagttacaagaggcagacctacaggtggacaaggagaggcacaattttttcgagtcctctcttgattatgtttatcaaatccaggaagttcaggagtccaagaagttcaatattgtggagcctgtcttggcctttcttcatagtctgttcatttctaacagcctgactgtggagctcacacaggatttcctcccatacaaacaacagctccaactcagtttacagaatacaagaaatcatttctccagtacccgggaagagatggaagaacttaagaaaaggatgaaagaagctccccagacatgcaaacttccaggacagccaactattgaaggctatctctatacacaagagaaatgggctttaggaatatcctgggtgaaatactattgccagtatgagaaagagaccaaaacactgaccatgacgcctatggagcagaagccaggtgctaagcaggggcccttggacttaacactgaagtactgtgtgagaaggaagacggagtctatcgacaagaggttctgttttgacatagaaactaatgaaaggccaggaaccatcactctgcaggccctttcagaagctaacagaaggctatggatggaagccatggatgggaaagaacctatctaccacagccctataacaaaacagcaagaaatggagctaaatgaagtgggcttcaagtttgtcaggaagtgcatcaatattattgagaccaaagggatcaagacagaagggttgtaccgcactgtgggcagcaatattcaggttcagaagctgctgaatgccttttttgatcctaaatgcccaggagatgttgattttcataatagtgactgggacattaagacaatcaccagctccttgaaattctacctcaggaatctttctgaacctgtcatgacctatagacttcacaaagagctggtctctgctgccaagtctgacaacctggattaccgcctaggagctattcactccctggtatataagctaccagaaaagaaccgagagatgctggaacttctgataagacacttggtcaatgtgtgtgagcacagcaaagagaatcttatgaccccctccaacatgggagtaatctttgggcccaccctgatgagagctcaggaggacactgtggccgccatgatgaacatcaaattccagaacatagtggtggaaatactaatcgagcactttggcaagatctatttaggtccacctgaggaaagcgctgcaccgccagtgcctccgcctcgggtgacagcaagaaggcacaaaccaatcacgatttcaaagcgcttgctgcgagaaaggacggttttctatacttcttccctggatgaaagcgaagatgaaatccaacatcaaacaccgaatggtactatcaccagcagcatagaaccccccaagccaccacaacaccccaaactacctattcagaggagtggggaaactgatcctgggaggaagtccccaagcaggcctattttggatggcaagttggagccctgcccagaggtggacgtggggaagttggtgtctaggctgcaggatggagggaccaagatcaccccaaaggccaccaatggacccatgccaggctctgggcccaccaagaccccctctttccacataaagagaccagctccccggcccctggcccaccacaaggagggggatgctgacagtttcagcaaagtgcggcctccaggagaaaagccaaccatcatccgccccccagtgaggcccccagatcctccctgccgggcagctactccccaaaagccagaaccaaagccagatattgtggctggcaatgcgggggaaatcacatcatctgtggtggcttccaggaccaggttttttgaaacagcttcccggaaaacaggaagttctcaaggcagacttcctggagatgaaagttgaggctacaggttttaaaagccttggcctcagaggaccctttccaggttctgaaagagtctttcttcttcaaacctttgtgtgcggagtcattttgtgttgaagagcagctccttcctagccttgcactttcagactctctctgggaggccataaaataaggagcatatgtcctagacaggtgtttatatctcctttgtattctgtcttcatcccctcagaaggtctgttttgagttcctataacactgtgaagagctggactccctcaagccagactctgccaaaaccaagatatccacttacctgagttgaagaggggagctcagttttcaactcttccctgaacttcctgcttcctcagagggccattgaactctgagagatttggggctaaagactgatctcaggggtcttaccttgaactgaaggccacttgagttggggccattgcttaccttggttggaagggaatagaaatgtttgctgaacattggagaatctcaacatgtctcctactgaggatatggacactggtgccatgtcagcgctctggtgctgcagtatgttgccaagagcccgtctgctcctgcgaggctatgagtgggatgagtgatgcccccacagcacctccatgtggacttaggaaggtggccttcctgctgttacatgcagccacttaggacaaatctgcaaagcatgttttgcatgtaaaagcctaggtctatttggattattctttctccttttttttgacagcttcctgtcaagcaatcaagaaacaaacaaaagctgaacacatttccttttaaaaaaaggagactgtgtttggtcctgtaggagttctattttggggtcaaatgctagaaaaattgttaaggtggattgaggccaggcagctgtcactgctgcttcatgtttgccttctgcacataaactcttttatctcctgaaaaaagcagttcttaacccagtgtccatggactcagaaactccatgatgcccctgagatggtatgcacaattccatgacaatatgccctttctggggagatagtccataatgttctgctaaatttcaaatgggctcgtgacccaaaaaagtcaagaaccacagcacttgagttaaaatactctttttacaatccatataagcccttgattggaagggcttttcaaaatcatttagtctaacaactgcccagtttccagtcgggggaactgaggcagagcaaggtagtgatcacaccagtacaagatttcaggtcccaggctcctatgcaagttttttttccccattatatcacacttatttagcaagggaccttgtggtttgtggctttagtggccatcatttctgggggttggcttttaccctttttcttgaatatttgccaccaagtgaaaaatgttaggacataaacccttgccaggtccctttcatttgctatctctattattggaaaggacctaaaaattggtgtaatggggcagaaatctgaggaatggacatttctaattcctgtttgttgaagggaagttgctggaaagagcatcagtacttgtttctatgcagatgcctgggccgtagcttgtctgtagcgtctgtataattataatgttgcccagtgtgagggaaagagctttcctacttgcactcttctaccaaggccctgttagtgcactgattatagtactgacagataaagcctagatgagagagatagagagtgagtacatgcacactcatgtgcaaacccactcagagatgcatttggaacagtgctactgaaaggcagtagtcattttcaagactgaattccaaacatggtttattggtgagttaggaacatgtaaggccaagtacactgagagcctttttgaaagtaattgagtggaaacttgatgccattctaaatcaaggcatatccaggtggcccggtttgaactcactccactgtacccagtctcaaaggccaggttgctaagaaaccaggagtaaaagagtcaagtgaccatcatttcacctgctgcttgcccccaatagtagtctctgtgaggccttactgacctcacctaggaagtgatttttgagcccttgtttcagggctgtggcctccctgctctatcctgaataaagcagacaggtgtgcagattttggccatgaaagcatggctaatagggccacagtccctttaaagaaacatggtttgactctggttttcttgggggaaaataccacaatcaccgatgcaaacattggaagattattgagagccctagaaagctgctgtgatcccagtagaaaatatgtcccagaaatgtcatgagattgctgtgtgttgcctgggacacagatcaagggcctatcttggagagctggggaccagcagtctgcctggaggccagggagcagtggctgagtagctctgcctttgctctggtctataccttaagaatgccaaagaatgaatttcaacgcctgcctttggcactctgacttaaagtgcaaaaagcttctgtggcgaggcatgctatcatggaatgagactggcttgccctaggcttaatggatgggcagtcattttgcagaggctatgggaagagggtgataatagaagagtggcagctataggaaattatcaacataccttggccagcaagttagagaatctggcaatggatgaactgaaagtgatgaactggcagggataacaaagaacctaacatttattaagcacgtatttattaactgctcagtgtttcatattcatgcaagtattctcattttacagagaaagaaattatggcccagggggctaaagtaaacaactcaagggcacatagaaagtaaataaaaggactgtgatttgaatccaggccactcttagcccatgctgttttccctttgccacactgtggtaggtgtttgaacagaggccacattactagagttggcatgactcttgactcttgcctgcctaacaaaatattgaaaggcaaacatttgaaggagggagggggtgcaggttcagtttatatggaaatgcaaactgggctggaagatattcctgagttaggctttctcttcatattcagcttgcacatttggtaatgtttttaaaatgatcatctaattttattttgtgaagtgaaggatttgtgttttagttggcagttgttaagtccttggcttgccatttttcaaaaagtaaaaaggtcctcacaggtgtctccatacttcgccaaggttgtagcatgggcagtttcagtttcagcctaagagactggtgacatccacaaatgcagttttagaagcagaaaaggtcttggtgcctctgcagtacttgatgtattggggtcaaatctctacaaatttttctgtggtgatagcaaaatcaagagatggcttacaaaaagaaatattgaatttttatttttgaagtttttgttttttaaaaggttgggggtgttcagccactgagggacaaaacttagcatctaatttcaattatagtgtcatgcagagtatttctaaagtaattggttatcatgggaaagtattctcttttcaagaagttctttgattctgtaataactagaacaaataaagtagtaaaagaagaaatagttctgtgactaggaaaaaattgcttttgagagaacatagatcaattatactacttctaaggtagctgcagataagtggccttgacacattacaagcctggaaaaaaacatcagaaataataaaaaatttcagagagaatcaagatacctttttttttcttttttttttcttttttttattatactctaagttttagggtacatgtgcacattgtgcaggttagttacatatgtatacatgtgccatgctggtgcgctgcacccactaatgtgtcatctagcattaggtatatctcccagtgctatccctcccccctcccccgaccccaccacagtccccagagtgtgatattccccttcctgtgtccatgtgatctcattgttcaattcccacctatgagtgagaatatgcggtgtttggttttttgttcttgcgatagtttactgagaatgatggtttccaatttcatccatgtccctacaaaggatatgaactcatcattttttatggctgcatagtattccatggtgtatatgtgccacattttcttaatccagtctatcattgttggacatttgggttggttccaagtctttgctattgtgaatagtgccgcaataaacatacgtgtgcatgtgtctttatagcagcatgatttatactcatttgggtatat

SEQ ID NO: 57228 - DNA, 1420 bp, Homo Sapiens
tgaaacagcagattacttttatttatgcatttaatggattgaagaaaagaacctttttttttctctctctctctgcaactgcagtaagggaggggagttggatatacctcgcctaatatctcctgggttgacaccatcattattgtttattcttgtgctccaaaagccgagtcctctgatggctcccttaggtgaagttgggaactatttcggtgtgcaggatgcggtaccgtttgggaatgtgcccgtgttgccggtggacagcccggttttgttaagtgaccacctgggtcagtccgaagcaggggggctccccaggggacccgcagtcacggacttggatcatttaaaggggattctcaggcggaggcagctatactgcaggactggatttcacttagaaatcttccccaatggtactatccagggaaccaggaaagaccacagccgatttggcattctggaatttatcagtatagcagtgggcctggtcagcattcgaggcgtggacagtggactctacctcgggatgaatgagaagggggagctgtatggatcagaaaaactaacccaagagtgtgtattcagagaacagttcgaagaaaactggtataatacgtactcgtcaaacctatataagcacgtggacactggaaggcgatactatgttgcattaaataaagatgggaccccgagagaagggactaggactaaacggcaccagaaattcacacattttttacctagaccagtggaccccgacaaagtacctgaactgtataaggatattctaagccaaagttgacaaagacaatttcttcacttgagcccttaaaaaagtaaccactataaaggtttcacgcggtgggttcttattgattcgctgtgtcatcacatcagctccactgttgccaaactttgtcgcatgcataatgtatgatggaggcttggatgggaatatgctgattttgttctgcacttaaaggcttctcctcctggagggctgcctagggccacttgcttgatttatcatgagagaagaggagagagagagagactgagcgctaggagtgtgtgtatgtgtgtgtgtgtgtgtgtgtgtgtgtgtgtatgtgtgtagcgggagatgtgggcggagcgagagcaaaaggactgcggcctgatgcatgctggaaaaaagacacgcttttcatttctgatcagttgtacttcatcctatatcagcacagctgccatacttcgacttatcaggattctggctggtggcctgcgcgagggtgcagtcttacttaaaagactttcagttaattctcactggtatcatcgcagtgaacttaaagcaaagacctcttagtaaaaaataaaaaaaaataaaaaataaaaataaaaaaagttaaatttatttatagaaattccaaaa

SEQ ID NO: 57229 - DNA, 1759 bp, Homo Sapiens
agcggatgctggggctgtaaggcgcgcgcggtcagctgttggcggtgcagggaggaggacgccggggctcgccttccctcctctgccgccgctgccgccatgattccggtgtcgctggtggtggtggtggtgggtggctggactgtcgtctacctgaccgacttggtgctgaagtcatctgtctattttaaacattcttatgaagactggctggaaaacaacggactgagcatctcccctttccacataagatggcaaactgctgttttcaatcgtgccttttacagttggggacggcggaaagcaaggatgctttaccaatggttcaattttggaatggtgtttggcgtaattgccatgtttagctcattttttctccttggaaaaacgctgatgcagactttggcacaaatgatggctgactctccctcttcttattcttcctcctcttcttcctcttcctcctcttcttcctcttcctcttcttcatcttcttcctcttcctcgcttcacaatgaacaggtgttacaagttgtggttcctggtataaatttacccgtcaatcaactgacctatttcttcacggcagttctcattagtggtgttgtacatgaaattggacatgggatagcagctattagggaacaagttcgatttaatggctttgggatttttctcttcattatttatcctggagcatttgttgatctgttcaccactcatttgcaacttatatcgccagtccagcagctaaggatattttgtgcaggtatctggcataattttgtccttgcactcttgggtattttagctcttgttctcctcccagtaattctcttgccattttactacactggagttggggtgctcatcactgaagttgctgaggactctcctgccattggacccagaggcctttttgtgggagaccttgtcacccatctacaggattgtcctgttactaatgtgcaagattggaatgaatgtttagataccatcgcctatgagccccaaattggttactgtataagtgcatcaactttacagcagttaagtttcccagttagagcatacaaacgactagatggttcaactgaatgctgtaacaatcacagcctcacagatgtgtgcttttcctacagaaataattttaataagcgtttgcatacatgtcttcctgcccggaaagcagttgaagcaactcaagtttgcagaaccaataaagactgtaaaaaaagctcaagttcaagtttctgtataataccttctttggaaactcacactcgcttaataaaagtaaaacacccacctcagattgatatgttatacgtaggacatcctctgcatcttcactacacagtgagcatcaccagttttatcccacgttttaactttctaagcatagatctgccagtggttgtggagacatttgtcaagtacctgatttccctctcaggagctctggctattgttaatgcagtaccctgctttgctttggatggacaatggattctaaactctttcttggatgccacccttacctcagtgattggagacaatgatgtcaaagatctaatagggtttttcatcttgctgggtggcagtgtacttttggctgccaatgtgaccctgggactctggatggttacagcacggtaatgtttgcactcatctgacagaatccctgagttacagtatacagctatgtggtaatattcattgccattgaaattcttacttggtatgaaatataaagtgt

SEQ ID NO: 57230 - DNA, 7909 bp, Homo Sapiens
ttcaagtatggcagacaaaggatgttctgcgtggggaaatgtggtgacacccatttcacaaggacagctcacatagattgagtgctcaggaaggaccagcaccatacccagtgcctgatgtgtatcatctcaattagtccttgcctcagatgcaaaaggaaaccatcgccatcatcatcaccaccatcatcatcttcctcctgtgcagatggaaaggctgaggcatagagaggtgacggagtctgcccaggactgcaagcctgctggtggcagagccaggttccaatggaatgaaggctgtcatcctcagatggcagggtaggcaggtggctagagctcacttgggagaaggggaaaggacactgactttggctagggatggagcagagcttgggctggctttccatgcacgggcagggggcgtggctcatggctacgctccagccccgggtgtggacattgaatcttccaggtctaccctaggctatgggtctggacagcactgtgatggaaagaagacactctatgtcctgcattctgtgaccaatgatgtgactgtgggaatggcgctggcatctggctgccactctgggacgggtggccagctgccatcaggccccacccaggatgggaccaccatgcgacttcttccctcgctcctcctggtcatgtccagagccccaggaggaccagcaaagcctctcgagccgatggcagctcacgttctgccttgtcagctactcctctcctgggcaatattggctgcttgctgtggctctccccggggtatgtgactgcctctgtgctgggcacctggcctgggctttccttctgggcctgggcagctgggctcagcttggacccaggcagcagccacagaggggcccatggaggtgacagagttgcttctatgatggtgaacgggcagctgtgacacggaggaggcgaccactcctcagtttccaagtgctgcggtcagggccggggccagcaaagtccctcccatattcaaagagcgggtttgggtttgtcccaggaggacatagtcaggagcccatgctgggacatgcctcctccaaagttcagcctggatccccagcctctgccaacggccccgctccttagctaacccagcttgctcctgggttccacggcggagtcagatgtttctgggcagtttcacctttgtgccttaaatgcatgttgaggactttaaggaattgtggagaaatagggctgtggcaaaggcaagtgacaactgggaacaatgatcccgcagaggctgctgaggcctgggccccaggggcgtgggttcatccttctgcctgggctttggtgggaggggcagactctgtggtctgagacacaaaaaaacccaaaacatatgtgtgtacagacacacagcagagccacacacacacttgtgcccatgcacacactcacaggaggcccgtggactccgcacagggaagaaactcctccggtcgacagtggacggcgctgcagcagggactcacccccaagccctgcctgcctcccattgcccacctggccctggcttgatgggcttatctcatgctgtggccggggacctcttgcttcctgcaaccccttgctggactggggcctgggcctctcctgggctgtgcctagggtttgtaacccagggcctgtgccggcgtgcacagagcatctctccctgggaggctcagggctgcctcctcgagctctgtgggcctgcactggccggtgagcttgtggtgtgggttttcaggctgtatccttctacctcctgagcccaggggtcccaggcgccctgcagctgtctcctcggccatcctgtggggccccgaggccttgccctcacttcagtgcctgggtgctcaggctttgcccaggtgccaggagaaggtgtgagcatgagcctattggacacacctggcgacgtataccaggtgtcccacccctgccaccatggggcctcccgatacggcaaccaccacggacctgtggggaccaatgaggaaagagagaggcaggtctgggccaggctcacagggactccggcatagcagaccctgccccagcaggcccccttgtccttcctgggtcctggtccttcatgaggaactagcccatccctggtggggctcccaccccgcttctcagtgggctctatgcttgcctcgtcggagtcacccctcaggcagtcctgggatcctctcctttagacccactgtgccttcccggcctcccgggcttctgctgggggcagaagaaatgcctccccaggtctgtctctggaggctctgagggagatgggcttgggggctgtaggaggaggcagggattccagggtgtcaggaaggcaggggtgccaggtcccacctagtgaagtaataaaccgtgggtggtgatagtgacccagtgccctcactgcccagccccgcctgtcctcagccagcactgcagggatcccaggcccagactctggaggccttcactgatcccagccaccccagaaaagctgcagcctgcaggcaccagccgggccatatgcccagtgccagctagggcccaccgcccatcctgcacacggggccgctgggcaggtgcccctcacacccccaggatgtcagtgctcacctcgagcaaagcgccccagctcggccttgggaggtggtcatgtccagggggatgatggagagctgtccaaccaagagagcgggagggagggaaggagggagggagagagatagagagagagagagagagagaggaagtgtgggccctaaggctgccttagtggaggtgcgcgtggcctgcacctcaccaagcctagccactctcgcggctctgagtggctcacaggcttgtgagggccccgtcgctgcctgctgggtccccaccagggctccctctaggaatgcgccatggctgctatgacaatttgcacagcccagtggcttaaacaccatttataccacaggtccagatgaatcctgcagggccaaggtctgggggtgctggaggccatgctccctccaggcttgcggggagaacttccctgcctcctccagtctctccatccctgagctctcggctcctcctccgtcttcagggccagggcgtagcgtctgctctctcggcctctgcctccgcttcccacctcacctggcttctgtctatgtcagtctccctctgccaacctcctagaaggacacttgtgattacattagggctcacccctttaatccaggggagcctctccacttcatgattttcagctaacttgcttctgcacagaccccctttccctataagggcacacattcactggtcccggggctaaggaccttgctccaagtccctccacccatgatgctgtgccttccagaaacctgtcctctgcagctcggtcttgaccccaagcctgctggtgacctgaacttcacagggttatccccttggactgtgtgcagcacgatgcaatttctgggcctgaatgtcatgctccctggggcaggaccttgagcctgcagcacacactaggccacctgcagtctcacaggccatgccctgggtagacagggaggtgctcaaccccagctcgggtcctctagtctgcctggctaccatgcttctcactctcctgcatctgcagaccctgcgttgccatgtgaggcaggggtggggtggggctgagggcgtggctttggtccctggctgtccggatgaagtaccagagtgacgccacagcccatcccggtgacatgctcacccccaacccccgtgtccgggaccccggtcttgtgtggtccctgatgtggagtcctcagtccttaagatacatccagaaagtcctggccatgaattggaggtgcagagtcctgcagagcctctgggctgggctggtgcccccaggagatggagggcctggtggatgccctcctccctcagagctggggcagctgcctcccaggggtgggactctgggctcagagagaggcccttgagctgcagctcagggggatgcgaggcttcgtggactgtgtcctggtccatgtggtgcacgtgtctccacctccaaggagaggctcctcagtgtgcacctcccccacatccgtcctctctgccggccccgggcgtctgagcagtcattccatgccagcacctctgcagcctgctgggcctcaggttctctgtgagggacctccccggccttcggcggaggtggagtaagctccgtcaaggcaggtggcttcgtcccttcctgtgagtgacaccagtgatgaaatggacccctccacacaggcatcctcagggcacagggccctgggggcaccttcctcctttcgtatttgttgagaaaaaaagtggcattgcgctcacaccaggatgctggagcagagctgacatgctcgggaaagggcagaggtcactgggggtgggaaggtcatccagtccagactcagcacctcgtgggctggtaaactgaggctcaaagtgctggtgccaggcctgaggcctcgcggtgacccctctctctggttcccagcacctgcctgagacctgccccaggcacccataacctggaattccctgtttccttgtccagggcctgaggaaatggctccccaggtctgtctctggatgctctgaggcagatgggcttgggggctctaggaggaggcagggactccagggtgtcaggaaggcaggggtgccgggtcccacccagtggagtaacaaactgtgggtggcgtttgggcctccccgccttccccactgggtgtgctggtgctggcgctgctgggtcagggctgcccgtgaccccagacaccactgtccatcctgtgaggctcccgtctgggcatgtcctgggtggattcctcctttctgttaagtagctacatgaggcaggggctcctggatccaaagcaaatgacaggaattccagagccaggtgcatccactcagggcagccagtgttggtggagctgcctctagcacatggaggagagtgaaagtcagcctgcccctctcacgagaaaagaacctggggatacctctcagcctccagcgttgcaagtgcaaggccagtggagttaatctgcaacgtgcacgagggcgtgtgtcagtggctgtgtgcaggagtgtgagtgagcaagagcaagagcgcatggctcctgctgtacctcaaggtgtgggctcctggtggctgctcagtgttcccaggggtgagaggcctcatgtatcctaggctgcctgagatttctgtgtgctgatcgcatcctcagtttcttgtccaccgcttcactggcaagagtcccaggctccaaggacaccctccctgcacatgattgggtgttaatggtggcctgggttgtgtcttcccctggggatgagggttgggtgtccatggtgccctgggctgtgtcctcccctagggatgagggtcgggcctccacgatgccctgggctgtgtgctcttatgggaatgagggttgggtgtccaagatgccctgggctgtgtccttccctggggatgagggttggatgtccaagatgccctgggctgtgtactcccctaggaatgagggctgggtgtccaagataccctgggctgtgtcctcccctggggatgagggttgggtgtccatggtgccctgggctgtgtcctcccctggggatgacggttgggtgtccatggtgccctgggctgtgtttccttggggatgagggttgggtgctatggcatcctgggcaggtgcttcctttctgcacaagggttgggtgaccatgatgtcctggcaatggcttccctgggttgcctcttttctgccatgtgggaagagcaggggaggtttagttggtctcagcacatcattctctcaggataagtagaagagtgtctgagctgtgaggccagtgctccagctttggaattgtcttccccaccctcacctccatcccatcaaagcccgacatgtcgtgtggcagcagcgaggtgggtgttggctgttctcttgggctgggggttagtcgtggacggggaaaggagagatgctggtcaaagggcatgaagtttctgctgatgggaggagtcagttcttttgatctgttgcacagcatggtgactatagttaacaataatgactatttcaaaattgctaaaagatgagattttaaatgttctcaccacaaaatgataagtgtgtgaggtgatggatatgccacttaccttgttttaatcatcccacaatatagacaggcattgtcactttgcattgtaccccaggaatcttcacatttgcttttttgtcaattaaaaatagagacacaaaaggagagaggggagagcaatagactcttcacggaaccgtgggcttctgcctccgggtaaaataaactgcaaaaaggattcccaggaaaccgttccctctttcagcccttggttacaggaagccggatttgggaaatctgcctggatgacattcacatgaacgggcacatacaggaaaacacggtaatgtaattagaatagtcagagaaaagtagccagaaatgacattcacatgaacgggcacatacaggagaaaacacggtaacgtaattagaatagtcagagaaaagtagccagaaatgacattcacatgaacgggcacatataggagaaaccatggtaacgtaattagaatagtcagagaaaagtagccagaaatgacattcacatgaacgggcacatacaggaaaacacggtaatgtaattagaatagtcagagaaaagtagccagaaatgacattcacatgaacgggcacatacaggagaaaacacggtaacgtaattagaatagtcagagaaaagtagccagaaatgacattcacatgaacgggcacatacaggagaaaacacggtaacgtaattagaatagtcagagaaaagtagccagaagaatttgcaacgtgcccttgtaacaccaaatttgatcagttttttaaaaaatgatcgttatgtaggtgattgagaagtaaatgtattcttttttaaggtaaaaatttggacccttatcatgcatacccccctctgtgctcttcaaatcaacatcattattaatatctgtacatttttgctcatctgagccagcacaggctgaggctgtcagaatggacaccttttggttgttgggtttctgtcagtttctggggtgaagctgcgtgattgagaacgtagctcttggctgccatctcggggattattaaggactgtgaactctatccacaagccatggcaatatctgtcccaccgaatgctccctctaacacactcttactcccgtgatgtgtgttaagggctccgatgatgctgaaaacagcacaggatgtgaaaaggcaggaacagttctgaagtcaaaggctgatgtcctgtttctctttccctctgtgaccgactcccttcccagtggtaacaagtacccacagcttggtttgaatttctgcacgctgttgtctgtgcactcgctcacacttacgcacacagcaggcatgtgggcgatgctgggtattttgtgtatgagtgggatgcacatacacacatctacatccatatcatgcccatgcatctgtaacttgcttttcccgtgtaagaacacttcttagagtttgttcaatgcatgtgtctgtgtgaatgattgaaggcatttctaacccattttaaagatggctacttaggaccatatggatgttgtactgatgtcatttgaccacgtccattgtttccatcttttgggctgttcttgtgtattttactttccatgtaacactgtgacattgagaattggtacctacaacagtctatttgctttacattaaatttgtaggctaatttgtgtaaaaaaaaaaaaaaaaa

SEQ ID NO: 57231 - DNA, 1625 bp, Homo Sapiens
gcaggggtgaagggtgaaaagcgtcattcgaggtccgggtccggcttgcggggtcagcgaactggagaggcgccatgggctggatcacagaagatcttattagacggaatgctgaacacaacgactgtgtcattttttccctggaggaactctcgttgcatcagcaagaaatagaaagactagaacacattgataaatggtgccgggatttaaaaattctctatcttcaaaataatcttattgggaaaattgaaaatgttagcaaactcaagaaacttgaatatttgaatttagctttaaacaacattgaaaaaatagaaaacttggaaggatgtgaagagctggcaaaacttgacctgactgtgaatttcattggagagctgagcagcattaaaaacttgcagcacaatatccatctgaaggagctctttctcatggggaacccatgtgcttcctttgaccactatagggagttcgtggtagcaactcttccacaattaaagtggttggatggtaaagaaatagagccttcagaaaggattaaggcattgcaggactattcagtaattgaaccacaaatcagagagcaggaaaaagatcactgtcttaaacgagccaaactcaaggaagaggctcagaggaaacaccaagaagaggataaaaatgaagacaagagaagtaacgcaggctttgatggacgttggtacacagacatcaatgctactctttcctctttagagagcaaagaccacctacaggcaccagacacagaggaacacaacacaaagaaattagacaacagtgaagatgacttggaattctggaataagccctgtttgtttactcctgaatcaagattggaaactcttagacacatggaaaaacaacggaagaaacaggaaaaattaagtgaaaaaaagaagaaagtgaaaccacccaggactttgatcactgaagatgggaaagccctaaatgtgaatgagcccaaaattgacttctctttgaaagataacgaaaagcagatcatcctggaccttgctgtctataggtatatggatacctctttaatcgatgttgatgtgcaaccaacttacgtgcgagtaatgatcaaaggaaagccatttcagcttgtccttcctgcagaagtgaaacccgatagtagttctgctaaaagatctcagacaacgggtcatttggtcatctgcatgcccaaggtaggagaagtaatcacaggtggtcagcgagcattcaaatctatgaaaactacctcggacaggagcagagaacaaacaaatacaagaagcaagcacatggagaaactagaagtagaccctagcaagcactcattccctgatgtgactaacatagttcaagagaaaaaacacacacccagaagacgacctgaacccaaaattataccaagtgaggaagacccaacctttgaagacaaccctgaagtgcctccgctgatttgaaacatctggctgcgttgccattggctgagacccaccaggtccagttttggttggtgtagagaccatatgcatattattcctgggataaacacagagttatttgtcaaaaaaaaaaaaaaaaaaaaaaaaaaaaaaaaaaaaaaaaaaaaa

SEQ ID NO: 57232 - DNA, 5050 bp, Homo Sapiens; identical to SEQ ID NO: 22281

SEQ ID NO: 57233 - DNA, 1048 bp, Homo Sapiens
gcgccgcaaggcactgagcaggcgaaagagcgcgctcggacctccttcccggcggcagctaccgagagtgcggagcgaccagcgtgcgctcggaggaaccagagaaactcagcaccccgcgggactgtccgtcgcaaaatccaacatgaaaatcctcgtggccttggcagtcttttttcttgtctccactcagctgtttgcagaagaaataggagccaatgatgatctgaattactggtccgactggtacgacagcgaccagatcaaggaggaactgccggagccctttgagcatcttctgcagagaatcgcccggagacccaagcctcagcagttctttggattaatgggcaaacgggatgctgattcctcaattgaaaaacaagtggccctgttaaaggctctttatggacatggccagatctctcacaaaatggcttatgaaaggagtgcaatgcagaattatgaaagaagacgttaataaactacctaacattatttattcagcttcatttgtgtcaatgggcaatgacaggtaaattaagacatgcactatgaggaataattatttatttaataacaattgtttggggttgaaaattcaaaaagtgtttatttttcatattgtgccaatatgtattgtaaacatgtgttttaattccaatatgatgactcccttaaaatagaaataagtggttatttctcaacaaagcacagtgttaaatgaaattgtaaaacctgtcaatgatacagtccctaaagaaaaaaaatcattgctttgaagcagttgtgtcagctactgcggaaaaggaaggaaactcctgacagtcttgtgcttttcctatttgttttcatggtgaaaatgtactgagattttggtattacactgtatttgtatctctgaagcatgtttcatgttttgtgactatatagagatgtttttaaaagtttcaatgtgattctaatgtcttcatttcattgtatgatgtgttgtgatagctaacattttaaataaaagaaaaaatatcttgaaaaaaaaaaaaaaaaa

SEQ ID NO: 57234 - DNA, 1615 bp, Homo Sapiens
gggtagagtgagaagcaccagcaggcagtaacagccaacccttagccattgctaagggcagagaactggtggagcctttctcttactcccaggacttcagcacctaagacagctccaaaacaaaccagaacagtcagctccgggggagcacgactgggcgagaggcacagaaatggacaccagaaataaggcccagctccttgtgctcctgactcttctcagtgtgctcttctcacagacttcggcatggcctctttacagggcaccttctgctctcaggttgggtgacagaataccctttgagggagcaaatgaacctgatcaagtttcattaaaagaagacattgacatgttgcaaaatgcattagctgaaaatgacacaccctattatgatgtatccagaaatgccaggcatgctgatggagttttcaccagtgacttcagtaaactcttgggtcaactttctgccaaaaagtaccttgagtctcttatgggaaaacgtgttagtaacatctcagaagaccctgtaccagtcaaacgtcactcagatgcagtcttcactgacaactatacccgccttagaaaacaaatggctgtaaagaaatatttgaactcaattctgaatggaaagaggagcagtgagggagaatctcccgactttccagaagagttagaaaaatgatgaaaaagacctttggagcaaagctgatgacaacttcccagtgaattcttgaaggaaaatgatacgcaacataattaaattttgagttctacataagtaattcaagaaaacaacttcaatatccaaaccaaataaaaatattgtgttgtgaatgttgtgatgtattctagctaatgtaataactgtgaagtttacattgtaaatagtatttgagagttctaaattttgtctttaactcataaaaagcctgcaatttcatatgctgtatatcctttctaacaaaaaaatatatttaatgataagtaaatgctaggttaattccaattatatgagacgtttttggaagagtagtaatagagcaaaattgatgtgtttatttatagagtgtacttaactattcaggagagtagaacagataatcagtgtgtctaaatttgaatgttaagcagatggaatgctgtgttaaataaacctcaaaatgtctaagatagtaacaatgaagataaaaagacattcttccaaaaagattttcagaaaatattatgtgtttccatattttataggcaacctttatttttaatggtgttttaaaaaatctcaaatttggattgctaatcaccaaaggctctctcctgatagtctttcagttaaggagaacgacccctgcttctgacactgaaacttccctttctgcttgtgttaagtatgtgtaaaatgtgaagtgaatgaaacactcagttgttcaataataaatatttttgccataatgactcagaatattgctttggtcatatgagcttccttctgtgaaagtacatttggagacacaactatttttccaaaataattttaagaaatcaaagagagaaaataaagaccttgcttatgattgcagataaaaaaaaaaaaaaaaaaaaaaaaaaaaaaaaaaaa

SEQ ID NO: 57235 - DNA, 1828 bp, Homo Sapiens
ggccgaggctcaagagagcgtggcgtcgcattgccgtttttgctcagaatcgcgactaaggctttttttttttctccctctgaacggttaggctatggctgcgataaaggccgtcaactccaaggctgaggtggcgcgggcccgggcagctttggctgtcaatatatgcgccgcccgagggctgcaggatgtgctgcggaccaacttgggtcctaaaggcaccatgaaaatgcttgtttctggtgcaggtgacatcaaactcaccaaagatggcaatgtgctgctcgatgagatgcaaattcaacatccaacagcttccttgatagcaaaagtagcaacagctcaggatgacgtcacaggagatggtactacttcaaatgttctaattattggagagttattaaaacaagctgacctgtacatttctgagggcctgcaccctagaataatagctgaaggatttgaagctgcaaagataaaagcacttgaagttttggaggaagttaaagtgacaaaggagatgaaaagaaaaatcctcttagatgtagctagaacatcattacaaactaaagttcatgctgaactggctgatgtcttaacagaggttgtggtggattctgttttggctgttagaagaccaggttaccctattgatctcttcatggtagaaataatggagatgaagcataaattaggaacagatacaaagttgatccaaggattagttttggatcatggtgcccgtcatccagatatgaagaagcgagtagaagatgcatttatccttatttgcaacgtttcactggaatatgaaaaaacagaggtgaactctggtttcttttataagactgcagaagagaaagagaaattggtaaaagctgaaagaaaatttattgaagatagagtacaaaaaataatagacctgaaggacaaagtctgtgctcagtcaaataaaggatttgtcgtcattaatcaaaagggaattgatccattttccttagattctcttgcaaaacatggaatagtagctcttcgcagagcaaaaagaagaaatatggaaagactctctcttgcttgtggtggaatggccgtgaattcttttgaagatctcactgtagattgcttgggacatgctggtcttgtgtatgagtatacattaggtgaagaaaagttcacttttattgaggagtgtgttaacccttgctctgttaccttgttggttaaaggaccaaataagcatactctcacacaagtcaaggatgccataagagatggacttcgtgctatcaaaaatgccattgaagatggttgtatggttcctggagctggtgcaattgaagtggcaatggctgaagctcttgttacatataagaacagtataaaaggaagagctcgtcttggagtccaagcttttgctgatgccttactcattattcccaaggttcttgctcagaatgctggttatgacccacaggaaacattagtaaaagttcaggctgagcatgtcgagtcaaaacaacttgtgggcgtagatttgaatacaggtgagccaatggtagcagcagatgcaggagtttgggataattattgtgtaaaaaaacaacttcttcactcttgcacagtgattgccaccaacattctcctggttgatgaaattatgcgagctgggatgtcttctctcaaatgatgattgaattcaaaatcaacccttctagaagatgaaatttagtacactttacatctgactactattgtgtagcctgagccattctgaatttctacacaataaatgcagtttatgtcttttgggtcttaaaaaaaaaaaaaa

SEQ ID NO: 57236 - DNA, 6383 bp, Homo Sapiens
ggcacgcagaggccgtcacgtgggtcgccgaggctcgcaagtgcgcgtggccgtggcggctggtgtggggttgagtcagttgtgggacccggagctgctgacccagcgggtggcccaccgaaccggtgacacagcggcaggcgttagggctcgggagccgcgagcctggcctcgtcctagagctcggccgagccgtcgccgccgtcgtcccccgcccccagtcagcaaaccgccgccgcgggcgcgcccccgctctgcgctgtctctccgatggcgtccgcctcaggggccatggcgaagcacgagcagatcctggtcctcgatccgcccacagacctcaaattcaaaggccccttcacagatgtagtcactacaaatcttaaattgcgaaatccatcggatagaaaagtgtgtttcaaagtgaagactacagcacctcgccggtactgtgtgaggcccaacagtggaattattgacccagggtcaactgtgactgtttcagtaatgctacagccctttgactatgatccgaatgaaaagagtaaacacaagtttatggtacagacaatttttgctccaccaaacacttcagatatggaagctgtgtggaaagaggcaaaacctgatgaattaatggattccaaattgagatgcgtatttgaaatgcccaatgaaaatgataaattgaatgatatggaacctagcaaagctgttccactgaatgcatctaagcaagatggacctatgccaaaaccacacagtgtttcacttaatgataccgaaacaaggaaactaatggaagagtgtaaaagacttcagggagaaatgatgaagctatcagaagaaaatcggcacctgagagatgaaggtttaaggctcagaaaggtagcacattcggataaacctggatcaacctcaactgcatccttcagagataatgtcaccagtcctcttccttcacttcttgttgtaattgcagccattttcattggattctttctagggaaattcatcttgtagagtgaagcatgcagagtgctgtttctttttttttttttctcttgaccagaaaaagatttgtttacctaccatttcattggtagtatggcccacggtgaccatttttttgtgtgtacagcgtcatataggctttgcctttaatgatctcttacggttagaaaacacaataaaaacaaactgttcggctactggacaggttgtatattaccagatcatcactagcagatgtcagttgcacattgagtcctttatgaaattcataaataaagaattgttctttctttgtggttttaataagagttcaagaattgttcagagtcttgtaaatgttattttaataatccctttaaattttatctgttgctgttacctcttgaaatatgatttatttagattgctaatcccactcattcaggaaatgccaagaggtattccttggggaaatggtgcctcttacagtgtaaatttttcctcctttacctttgctaatatcatggcagaatttttcttatcccttgtgaggcagttgttgactgagtttttcatccttacaatcctgtcccatggtatttaacataaaaaaaaataaaactgttaacagattcttgctcgatagcttgtttgtgtctgtcgtgttattagagggaactccactatatatggtcacttgaaattatgatgcaaaggtttctcttgcattgaaaccctcttggatattacagtatttttaattgaaagtcctaattctgttaaggaaaggagttgattaaattttaaggtaccactggtattttgggagattataatcagtttgttttcaagataatagaaaataaggtccatgagaatagaagttatgtgatttcagtgagttgatgtgtacagcatggctgtgctccatctgatttaccccattcttaagttctgagagtatgttctcaaggaagatttaactctctttggttttaaattactttttaaccagcctaataaataagtcttactacttttcataatatttcataatagttaaaagtaggtgtttttttcgtgctcaatttggcactcaaaataatgttcattatggaagtttggtaatactgagcaagcctgtggaattttctttatgaaaaatgattttagcctttgcaaatgttaaccatgtgaaacacattttcagtataagtatgcgttacagggtttgatactttcctgcacttaggtttgtcctattcttcatttattcatactaggatagaaaattttggaatcagaaaatagatccagtgtttagctacatacaatctagtacaagtgaatttttattcttaaacataggtgtgttggctctttttttaaaagatgcgctctacctgaaaaggaaattggattttagaactggatgtggtgcagtgaagtattttaggcccaggtctgtgtacacattttatagaagaatgaagtactctgaagtattttggttgccttttcatttcaactgtgttttgaatttgtcagatcacacatatattgtgttattgggcgctgtggtatcttttataaaacctcttgcttgtgtgcaaaagttcctaaaaggaaacacaagtaatgcctatccattactagcatgctatgctgcatgctttactgccattgctgtatgctttactgtctttgtaaaaatccccctctccccttttctggtaactggaaaagcatgctaaaaatagtcttatattttcaccccataaatgcagaatcagtaattccttggcttaaagctcttatataatcaatattattggtggtaaataccaagtttggtatctcatagctatctttttttaaagaaattaagttcttgaaaatttagccaaatcccgttttatgggaatgctctttagaattcattttgttcagcccctttgttctatggttgagaaatctgaggccttacgaaggttaagagaactttccccgtgtctcacaggtaggtagaggcagagctggaactagatatctggtctgttgactctagctcagtgtcttctggtaactgttgaaaattgtcttagtttgagagatggctgaaataatgaacataaaatgctatttataataacaagtatatgtgaaatttcttattgtaagactactaccggcttactgttgaatagtttggttatagtgtttaggctagaaatgcctcccacattggtaataaacattacaaaatacaatgtatttttaggtaggcattttataaaatgcattatgccatggttgcttttgagatagattgtagtctgggtagcatctttaaaatgtatgtgggcttaactgttgttcatatcaggagatgctctgattgtataggtgagactctgtttctgttatttttaattgctgtatgaaatgtgatcagattattttactaccaacagttatagtttgaaagtccaactgtattaattgactgataatatgataatatagagattaaattgtttgtcttcattccttatatgtttagaagtttttgctttgtctgcctgcttacttgtatatgtaagcatgagggaaatacactgttgctaatactgaaattacaatcaagtaactaaggccttgagttcatatgtgacactgaatgcactagcttccttcgttctataactaatgtaccttaacttcccccattcttatatttacaagaagctaagtcattatgttctgagtgtgtggtatgttcccttaaaaaaaaatgacacttggaagaaaaatgtatgaaattcagaaattccgatcaaagaaaagtaattctttctttttttttttgagacagagtcttgctttgttgcccaggctggagggcagtggtgtgatctcacctcactgcagcttccgcctcctgggttcaagtgattctcatggctcagccgcctgagtagctgggattacaggtgtgagccaacaagcccggctaatttttgtatttttagtagagacaaggtttcaccatgttggtcaggctgggctcaaactcctgaatccgcctgcctcggcctcccaaagtgctgggattacaggtgtgagctgccgcacccagccaagaaaaataatactcttaaatacttagatgttcacctaaagttgatattatttggtatgggaattacttttgaactgtaatctttcagattacaccactttgaaaacaagttttaacagtagggtaaaaatatagtttttgagggtattcccaacttgtgatcttctaccactttagagacattcaagtaatagttttcttagagctttgcacattcctattcactgagattttaaaaatttcacctttattcgagggaaggatcaatgcttattaccatttggaaaaacgaagatcagaaggtaaatgatctttattttctagctttaaagggaaattaaaccattcatgaataaactttaaaaatgtgaagtgtccttttccttttcacaatacaaaaaaaatttcaacagattgtgtggtttgtgcatttatatcctgttaagcattaatagctaatcactgggacttgaattctgatggcagatagtctcttgcttagtgagatggagttaactattttttagtaggaagtgagaacagctgattttcatgccacgtttcatagccccacttttggtagactaccaccacgcttcttcgcgtaagcagtggcatcttgggaatgaatgcccagccgctcgtgggttggtgcaaagaagtataaacatatatcactaaggaaaaagaaagtttgtcttgcccttctgacacagtgtgtgcacttcaggcaatttttggaaaatataaaaaattccaaattctgcctttcagcagcatcaattgctaggaacatttcattcatttccctgtaatattaatgttctttaagcataatcactaattataagttgtatcctatttttttccagcttaatttctgtggtttattgaaaaccaagtataaatgtgactaaaagcattttgctttgtttttatagttaactttcttaaggttatggacattttataatgtaacatttgattggcctggcctcttgacaattcccttctagttatgcatatcctcctgttgccacatttcttgttttaaaactcagtttcttgttttccagttgttgctatgtataacacccatcttgaaagagagtatataggaagttattcagataacttttgtagtagtgatattcaactatagcagtaccttaactcatgatgagcttaggaacataaaagataattgttgcttgaatagcacccccagagatactgacctaattggtctggggtggagatctggcatggtagtttttttcaagctccaatcatcggccagacagttgctttatgtaggtttttaaatgccaaaggcagatatgaagtagatttaattaagacttgacttcagcaatacaggggaacttaaaatacttatttttctttaaactgcaggagtcactgttaggtattgcttaaaaaaaattgcataaaagctttgcttgtcaagttaggattgctggaataccactaaagatttttgacttgtgaataaatgagctgtcatcgcaaaaaggcgatttgagaaatgtgggcttcagtattaattgccattttgctgacacccagtgtacctacctacctgagaaatttattttgtccatcatgtatttctcaaagcaaaaggtggttttcaagtataatgtcgttttcaacatgcttattacttagttttacgtcagctcatttcatcatcattgataacttgtgaaatacttatctccatcctatggaataggggagacgggtttagacaggttcaattagctcaagtctacacagctgaagtagcagagaaagtgggatctagatggtctgatcctagtgatctaccatatgaaggacatagtttgtgtcctggtccaagtcaaatattgactcctcacaaacagtaagtatggcaattttgtgatgcctttgattccactttacatggagtactattatttgtgaaatgtctttaagatttttggtcttaaatttttgaagactgctttccccctttatctcccagaaaattgagaagaagtaaactcctgcccactaacaatctcagtccgtgaacaaaaccaacatgaacattcctaaacaagagtgtgtgttactctaagaagaaggctatagaatttatggaaatggcttatgtaacctacaagactggagaacagaatgtgactggccttttctaatggtcctttaagatttaatgattaaagcaagagttttttat

SEQ ID NO: 57237 - DNA, 4138 bp, Homo Sapiens
cttctgtgctgttccttcttgcctctaacttgtaaacaagacgtactaggacgatgctaatggaaagtcacaaaccgctgggtttttgaaaggatccttgggacctcatgcacatttgtggaaactggatggagagatttggggaagcatggactctttagccagcttagttctctgtggagtcagcttgctcctttctggaactgtggaaggtgccatggacttgatcttgatcaattccctacctcttgtatctgatgctgaaacatctctcacctgcattgcctctgggtggcgcccccatgagcccatcaccataggaagggactttgaagccttaatgaaccagcaccaggatccgctggaagttactcaagatgtgaccagagaatgggctaaaaaagttgtttggaagagagaaaaggctagtaagatcaatggtgcttatttctgtgaagggcgagttcgaggagaggcaatcaggatacgaaccatgaagatgcgtcaacaagcttccttcctaccagctactttaactatgactgtggacaagggagataacgtgaacatatctttcaaaaaggtattgattaaagaagaagatgcagtgatttacaaaaatggttccttcatccattcagtgccccggcatgaagtacctgatattctagaagtacacctgcctcatgctcagccccaggatgctggagtgtactcggccaggtatataggaggaaacctcttcacctcggccttcaccaggctgatagtccggagatgtgaagcccagaagtggggacctgaatgcaaccatctctgtactgcttgtatgaacaatggtgtctgccatgaagatactggagaatgcatttgccctcctgggtttatgggaaggacgtgtgagaaggcttgtgaactgcacacgtttggcagaacttgtaaagaaaggtgcagtggacaagagggatgcaagtcttatgtgttctgtctccctgacccctatgggtgttcctgtgccacaggctggaagggtctgcagtgcaatgaagcatgccaccctggtttttacgggccagattgtaagcttaggtgcagctgcaacaatggggagatgtgtgatcgcttccaaggatgtctctgctctccaggatggcaggggctccagtgtgagagagaaggcataccgaggatgaccccaaagatagtggatttgccagatcatatagaagtaaacagtggtaaatttaatcccatttgcaaagcttctggctggccgctacctactaatgaagaaatgaccctggtgaagccggatgggacagtgctccatccaaaagactttaaccatacggatcatttctcagtagccatattcaccatccaccggatcctcccccctgactcaggagtttgggtctgcagtgtgaacacagtggctgggatggtggaaaagcccttcaacatttctgttaaagttcttccaaagcccctgaatgccccaaacgtgattgacactggacataactttgctgtcatcaacatcagctctgagccttactttggggatggaccaatcaaatccaagaagcttctatacaaacccgttaatcactatgaggcttggcaacatattcaagtgacaaatgagattgttacactcaactatttggaacctcggacagaatatgaactctgtgtgcaactggtccgtcgtggagagggtggggaagggcatcctggacctgtgagacgcttcacaacagcttctatcggactccctcctccaagaggtctaaatctcctgcctaaaagtcagaccactctaaatttgacctggcaaccaatatttccaagctcggaagatgacttttatgttgaagtggagagaaggtctgtgcaaaaaagtgatcagcagaatattaaagttccaggcaacttgacttcggtgctacttaacaacttacatcccagggagcagtacgtggtccgagctagagtcaacaccaaggcccagggggaatggagtgaagatctcactgcttggacccttagtgacattcttcctcctcaaccagaaaacatcaagatttccaacattacacactcctcggctgtgatttcttggacaatattggatggctattctatttcttctattactatccgttacaaggttcaaggcaagaatgaagaccagcacgttgatgtgaagataaagaatgccaccatcattcagtatcagctcaagggcctagagcctgaaacagcataccaggtggacatttttgcagagaacaacatagggtcaagcaacccagccttttctcatgaactggtgaccctcccagaatctcaagcaccagcggacctcggaggggggaagatgctgcttatagccatccttggctctgctggaatgacctgcctgactgtgctgttggcctttctgatcatattgcaattgaagagggcaaatgtgcaaaggagaatggcccaagccttccaaaacgtgagggaagaaccagctgtgcagttcaactcagggactctggccctaaacaggaaggtcaaaaacaacccagatcctacaatttatccagtgcttgactggaatgacatcaaatttcaagatgtgattggggagggcaattttggccaagttcttaaggcgcgcatcaagaaggatgggttacggatggatgctgccatcaaaagaatgaaagaatatgcctccaaagatgatcacagggactttgcaggagaactggaagttctttgtaaacttggacaccatccaaacatcatcaatctcttaggagcatgtgaacatcgaggctacttgtacctggccattgagtacgcgccccatggaaaccttctggacttccttcgcaagagccgtgtgctggagacggacccagcatttgccattgccaatagcaccgcgtccacactgtcctcccagcagctccttcacttcgctgccgacgtggcccggggcatggactacttgagccaaaaacagtttatccacagggatctggctgccagaaacattttagttggtgaaaactatgtggcaaaaatagcagattttggattgtcccgaggtcaagaggtgtacgtgaaaaagacaatgggaaggctcccagtgcgctggatggccatcgagtcactgaattacagtgtgtacacaaccaacagtgatgtatggtcctatggtgtgttactatgggagattgttagcttaggaggcacaccctactgcgggatgacttgtgcagaactctacgagaagctgccccagggctacagactggagaagcccctgaactgtgatgatgaggtgtatgatctaatgagacaatgctggcgggagaagccttatgagaggccatcatttgcccagatattggtgtccttaaacagaatgttagaggagcgaaagacctacgtgaataccacgctttatgagaagtttacttatgcaggaattgactgttctgctgaagaagcggcctaggacagaacatctgtataccctctgtttccctttcactggcatgggagacccttgacaactgctgagaaaacatgcctctgccaaaggatgtgatatataagtgtacatatgtgctggaattctaacaagtcataggttaatatttaagacactgaaaaatctaagtgatataaatcagattcttctctctcattttatccctcacctgtagcatgccagtcccgtttcatttagtcatgtgaccactctgtcttgtgtttccacagcctgcaagttcagtccaggatgctaacatctaaaaatagacttaaatctcattgcttacaagcctaagaatctttagagaagtatacataagtttaggataaaataatgggattttcttttcttttctctggtaatattgacttgtatattttaagaaataacagaaagcctgggtgacatttgggagacatgtgacatttatatattgaattaatatccctacatgtattgcacattgtaaaaagttttagttttgatgagttgtgagtttaccttgtatactgtaggcacactttgcactgatatatcatgagtgaataaatgtcttgcctactcaaaaaaaaaaaa

SEQ ID NO: 57238 - DNA, 2452 bp, Homo Sapiens; identical to SEQ ID NO: 25228

SEQ ID NO: 57239 - DNA, 1805 bp, Homo Sapiens
tgtttactttggttgtcccttctggcatggtgcatatgttatgggaagagggattataatttggtgctgtttgtagagatgacaacactgataaaatccactcattgctggtcccagcacacctggaaagttctgcaaggcctcagctacagaaagcccagagacagaaagtaaactctttcatgacccttgatcatcagatcatcaatccaactcttaaatggtcacaacctgcagtgccaagtggtgggcctcttgtgcagcatgcacacacaactctggacagtgatgctggcctcacagaaaacccactcaccaagttactagctattgggaaagaagatgacaatgcacaatggcatatggaggacgttattgaggatataatcggtatggaatcaagttttaaagaggaaggagcagactctcctctgctaatgcaaagaacattatctggaagtattttggatgtgtatagcggtgaacaaggaatttcaccaattaacatggggcttacaagtgcttcttgtccaagtagtctaccaatgaaaagagaaattacagaaactgacactagagctttagcaaaagagagacaaaaaaaggacaaccacaacctcattgaaagaagaagaaggtataatattaattaccgaatcaaggagcttggcactcttattccaaagtctaatgatcctgatatgcgctggaacaaaggaaccattctaaaagcatcagtggagtacatcaagtggctacaaaaagaacaacagagagcccgagaattggaacacagacagaagaaattagagcaggctaacaggcgacttctacttcggattcaggaactagaaattcaggctcgtactcatggtctgccaaccctggcttcacttggcacggttgatttaggtgctcatgtcaccaaacagcagagccatcctgagcagaattcagtagactattgccaacaactgactgtgtctcaggggccaagccctgagctctgtgatcaagctatagccttttctgatcctttgtcatacttcacagatttatcatttagtgctgcattgaaagaggaacaaagattggatggcatgctattggatgacacaatctctccatttggaacagatcctctgctatctgccacttcccctgcagtttccaaagaaagcagtaggagaagtagctttagctcagatgatggtgatgaattataagaaataaacagacccaattcatcaactggaaagcaattctatgctggtgctatgcaattatgctctgtgtttcatatgttgctttggcttattttttttcttaaaggaatgtgttgttcatgaaaaactgatagaagcaacagaagaattcgcaggaagaaaaatcatagtgttaatgaattattgagggcgaaaaaaaggtgttttcttctttgactacggagtccaaatccacttaaattctgttttcctgaaaagaggtacagcataagaaatagctctttattgatgttttaaaagcagcaacttggtggtgtactactggaactaatgactgcaaagtgttaaacgactgaaatatacaaacagtctcttagttactcatttccatcttctcttcaactttcacatcagtcttccggaatcaagatcaacatatcaggtggtcattgcctttctccattgtctagtagacatgtctaaagttcaaactttataggataaataaatgtataatagattatctgtcacttgtggttgaaaggcaaatctacaataaatgtgagaattttccacaat

SEQ ID NO: 57240 - DNA, 2819 bp, Homo Sapiens
ctgggcccagctcccccgagaggtggtcggatcctctgggctgctcggtcgatgcctgtgccactgacgtccaggcatgaggtggttcctgccctggacgctggcagcagtgacagcagcagccgccagcaccgtcctggccacggccctctctccagcccctacgaccatggactttaccccagctccactggaggacacctcctcacgcccccaattctgcaagtggccatgtgagtgcccgccatccccaccccgctgcccgctgggggtcagcctcatcacagatggctgtgagtgctgtaagatgtgcgctcagcagcttggggacaactgcacggaggctgccatctgtgacccccaccggggcctctactgtgactacagcggggaccgcccgaggtacgcaataggagtgtgtgcacaggtggtcggtgtgggctgcgtcctggatggggtgcgctacaacaacggccagtccttccagcctaactgcaagtacaactgcacgtgcatcgacggcgcggtgggctgcacaccactgtgcctccgagtgcgccccccgcgtctctggtgcccccacccgcggcgcgtgagcatacctggccactgctgtgagcagtgggtatgtgaggacgacgccaagaggccacgcaagaccgcaccccgtgacacaggagccttcgatgctgtgggtgaggtggaggcatggcacaggaactgcatagcctacacaagcccctggagcccttgctccaccagctgcggcctgggggtctccactcggatctccaatgttaacgcccagtgctggcctgagcaagagagccgcctctgcaacttgcggccatgcgatgtggacatccatacactcattaaggcagggaagaagtgtctggctgtgtaccagccagaggcatccatgaacttcacacttgcgggctgcatcagcacacgctcctatcaacccaagtactgtggagtttgcatggacaataggtgctgcatcccctacaagtctaagactatcgacgtgtccttccagtgtcctgatgggcttggcttctcccgccaggtcctatggattaatgcctgcttctgtaacctgagctgtaggaatcccaatgacatctttgctgacttggaatcctaccctgacttctcagaaattgccaactaggcaggcacaaatcttgggtcttggggactaacccaatgcctgtgaagcagtcagcccttatggccaataacttttcaccaatgagccttagttaccctgatctggacccttggcctccatttctgtctctaaccattcaaatgacgcctgatggtgctgctcaggcccatgctatgagttttctccttgatatcattcagcatctactctaaagaaaaatgcctgtctctagctgttctggactacacccaagcctgatccagcctttccaagtcactagaagtcctgctggatcttgcctaaatcccaagaaatggaatcaggtagacttttaatatcactaatttcttctttagatgccaaaccacaagactctttgggtccattcagatgaatagatggaatttggaacaatagaataatctattatttggagcctgccaagaggtactgtaatgggtaattctgacgtcagcgcaccaaaactatcctgattccaaatatgtatgcacctcaaggtcatcaaacatttgccaagtgagttgaatagttgcttaattttgatttttaatggaaagttgtatccattaacctgggcattgttgaggttaagtttctcttcacccctacactgtgaagggtacagattaggtttgtcccagtcagaaataaaatttgataaacattcctgttgatgggaaaagcccccagttaatactccagagacagggaaaggtcagcccgtttcagaaggaccaattgactctcacactgaatcagctgctgactggcagggctttgggcagttggccaggctcttccttgaatcttctcccttgtcctgcttggggttcataggaattggtaaggcctctggactggcctgtctggcccctgagagtggtgccctggaacactcctctactcttacagagccttgagagacccagctgcagaccatgccagacccactgaaatgaccaagacaggttcaggtaggggtgtgggtcaaaccaagaagtgggtgcccttggtagcagcctggggtgacctctagagctggaggctgtgggactccaggggcccccgtgttcaggacacatctattgcagagactcatttcacagcctttcgttctgctgaccaaatggccagttttctggtaggaagatggaggtttaccggttgtttagaaacagaaatagacttaataaaggtttaaagctgaagaggttgaagctaaaaggaaaaggttgttgttaatgaatatcaggctattatttattgtattaggaaaatataatatttactgttagaattcttttatttagggccttttctgtgccagacattgctctcagtgctttgcatgtattagctcactgaatcttcacgacaatgttgagaagttcccattattatttctgttcttacaaatgtgaaacggaagctcatagaggtgagaaaactcaaccagagtcacccagttggtgactgggaaagttaggattcagatcgaaattggactgtctttataacccatattttccccctgtttttagagcttccaaatgtgtcagaataggaaaacattgcaataaatggcttgattttttaaaaaaaaaaaaaaaaaaaaaaa

SEQ ID NO: 57241 - DNA, 8052 bp, Homo Sapiens
agagaggacttatctccagcatctagcactacagagcagaggctgtgtggagaatggctgaaaaatcagaattggttgtagaagcagttttctttctggttgtgagtatgagcccggcagacaccatgagcgctgttgcaggggagtcggcctgtgcttgacacatgtgtttcccattgatagctggagacagcccagtagctgtgagtcggtctgacaaagccatattgaagtacggagtacggtttcaaagcagtcagaaaaagaacgggaatgctgttcaggaaattcttcaggcatgggcagggacttggctgcagttctgcagttggaaaatctgactggggcagcttctgagcgcaggctgggcctgcacacactcagcgggccgagtggccacctccttcagagctgctcagcacgccctgggatcgcgggcggttttcatcggccggtttgtgaaacggacaagagagagacattactgccgggagtgttgagtgaagggaccaggtggagatgatgcctcaggagcagtacactcaccaccggagcaccatgcctggctctgtggggccacaggtatacaaggtggggatttatggctggcggaaacgatgcctgtatttctttgtcctgctcctcatgattttaatactggtgaacttggccatgaccatctggattctcaaagtcatgaacttcacaattgatggaatgggaaacctgaggatcacagaaaaaggtctaaagctagaaggagactctgaattcttacaacctctctacgccaaagaaatccagtcccgaccaggtaatgccctgtacttcaagtctgccagaaatgttacagtgaacattctcaatgaccagactaaagtgctaactcagcttataacaggtccaaaagccgtagaagcttatggtaaaaaatttgaggtaaaaactgtttctggaaaattgctcttctctgcagacaataatgaagtggtagtaggagctgaaagattacgagttttaggagcggagggcacagtgttccctaaatctatagaaacacctaatgtcagggcagaccccttcaaagaactaaggttggagtccccaacccggtctctagtgatggaggccccaaaaggagtggaaatcaatgcagaagctggcaatatggaagccacctgcaggacagagctgagactggaatccaaagatggagagattaagttagatgctgcgaaaatcaggctacctagactgcctcatggatcctacacgcctacaggaacgaggcagaaggtcttcgagatctgcgtctgcgccaatgggagattattcctgtctcaggcaggagctgggtccacttgtcagataaacacaagtgtctgcctctgaaagactatccatagtggacattgttggcagcataaaggccttttttggctttagacactggctgccagctatttttactagaacacagaaagcctatcaaagaccttgtgtgtatgtgtacgtgtgtgtgcgtgcttgagtgtgttcgcgtgtgtgggtggatataaatatatataaatatatataaataaatatatatatcctctgtataaaatgaggtttcagtacaaaaggaaccatgggtgaccctgcgatatccactgtcattttccatcccatccccaccacctgagtgacagaaatctaaacacacatccgtcccaacattccccagaccattcagaatcacacagcgtattaaacactgacagaatcttcatctagatattcgagtagcagcatatcttctcttttagtgtcattacgagggagtgatggcgggaatctcagtcgcactcaagctctgagacctttgtatcaaaaataggcatttgatttcctgttttagctttagtaaggctggctaacttccccctcttcaagctaggaactggcaatgctgtagaagtcagccgtaggaattcaaaatggctggcctaccttggctaccagacatattggggtttttgtagttgaatgaatgaggaggatgaatttcagcaaattttgaactgctcacccaacttctgctatcttgctccctccaaactcacagattctcctacagtcaaattaggagctgtaaatcagcacaaaataagataacagctgttcctcagtgagctggaagctacttaatggcctgatgggcaatgaacaaacgggtgatatgtctctgtttaagggaaaaatggcttaaaagctgttctgttctcacttctgactttaaccaaaagatttcaacccacaatgatcaggtcaatcaaaatccctaagagcagaactcctaccccaaaagaagcctggaagtctaattaagagtagcataaggaacctaattatgtttaccatgtttcttgggattggtgggaaatgtcaaaacatgccctttatttttaaaggcattcacaaactctctgactttgttcttcttatatattttttcagtgccgggatattcatattcctaaagccactattgtgttttctctaagaagcactacatgccaccagaattgtgcactgaaagataatacaaactgagtgtctttatgagaatcactgtgtcccctgaggcccagcagtacctgcttccctgtatgtggaagcagcacctcattcccgccatcagctacctctcatcaccccaccttcatcatcatgctccagggtcaccctggccagctcttgtgctgggacaggggattacaccatctctgttcaaagagggggaaatgtgcctatgccttaagtcaatgcactcagcaaggagaagcacatcttatttatcttgttacctatagtttactttgggtgattggaggggaatgacttagttatgactggacatcttaaaagctgatagacaagccaaatggctggcagatgatgtggatttcaaagagcccagaatgaactcatcactggcttagacagtcctggatgccatttggaaagtagtggccctgcaagcctaaatgaagtagtatttgtaggcctgggtggcatttggatttttcttttccctcaacaaggttttactttttcttactttacaagcaagggaagttttgtgataggagagaaataaaagatttgatattttttgagatgacactcaagcatcaggctgagatttgcacacatgggatgtaaaagcaagctgtgtgttgcttagtcacttacttagaagtagatggtgggggacagcggcgtgggtcctagcctggccagtgatgctgctggcgtccagaccccagactcactccaagcactcttgttcaatatctcatgcagaagagttgggctggtcactcttaggggtgagaccccgtgattggttggtttgtagcactaaggtctaaaaaggaaaaccataaaagacatcagattacgctggatcagtataattaatattccatagggccatgttgccagaatctgtatgtatcaatacagggtttttccaagccaggaaacgccctccttggctactaggagcacctatcccatatcattcagataaacaatgatagctacaaagtcatttgtggctagataggttaagacaggtgattttttaaagtagactgtctttgcattttgccatctgaagttcattaatctttagatgacaaaaaagcaaaaagttcccagaacgtttttgcttagattttgttctaatcaccacgtgaaggaatgagattagcaccacaagtttcatgccaataaaagagactggtgtgatcccacatgcaaaatttaatcctaagggtagtgagatcacaaacagaataaaaataagagcaatcaaccatataaatcaagtacctattgggaacagacataacattcaatttttcatttatgctaagtgaccacagtatacaaagtaataagcaggaaatttgatatgggttaaattatgcattttgttcagattttggaaattggtatgcattataagtttctcaatgtacatctttttatcccaacaccctcaaactagaatatttgtcagtggtcaagagaaaaaattttacctgaattcttgggggccggcggggagcttttacattaaaaatctactaacgcctactttttaaaaaatgagattctttctaatctttatatatgacattttctagacaatcgcacctttgggtatattaaacagctggtatcataacaaagaatccaaatgaaccttcaatatactagaagttctagtaggttaatattgttcagaagatttttacaaattaaaaactgatttccaaatatgttcaacatttacttctatttgatatctgctcaagaagtcatagaagtcttgggaaactattcgagtatcacagaggttttcaaaagcccttatggtgacatctacctaggtaaaagcctgacatgtggctttataattgttatgttacccaagggataaacttgaactggctttgaacatcctttaggtcattttctctttggataattttcatcgcatatccggcaactatagaccaaagtttgcttaaggtttgaccctagagcagaggtgggcaaactatgacctggaaaccaaatctgacttaccaccttttcctgtagttaaagttttattgtcacatagccacatacattcatttacatgttttctgattttacactacagcagcaggatggagtagttgtgtcagagactatgtatcccacaaagcatagattacttactatttagtcctttacaggcaaagtttcctcacccctgacctagaggtttttgtggtatgcattggatatagcaggaaagaaagcacatttccaaacagcagggagtaagcttacatttctgtgtaggtttgggaatatagttacttggcaaagtctttcaggaaggaagcccttccttatgttacatgtggaaagcctgccttccaagacatgtggaagtaattgatccacctgccagagaaacacaggctcagaggatgcctgggaacagggaggatgggattagtggaagcttaatggaaaaggaaagttatgatcctccaagacccttaattgatagaccataccaggttctgcaggtcagcatcattgtgtaatgagagtgaagtaggggaccctgtggttcaaccttagaatctgtttcctgtaggctctttctgctgtctatattcattaaagttttccacttcaccctcccatagtctagagggatgcccattccatggtcctccagagaatagttttgacttaacatgtctgtttagcccacatcacgtcagttatcaacaccgccactgtgcttactgttcctacagccacaccaggcttgaagagttagtgagaccaacaaataattggaagtattggaaaaagcaaaatacatggggacaaaaaaaatacagtgaaattctttttatcaaactgatgctgtgagaaaccagatgaatgccagtttggctttatttctaagaatctgggtcttcattctctggtgtagaaggaatgcaaaaaactataacaacaacaacaaaaacatattttgaaaagacatattctgacatctctgcttgtgtgtggtaaggcaggttcctatcagacatttatccctttggtcaagatcccttttgctcatccagggtttcatactcaatatcgcttaaaaaaaaaaaagtatcagctagggatgactctggaagtatgagtatcatggtggggaggaaggaattttttttaaatgtaaatgacccccatttaccagaccctaatcaaagtcacttaagggaatccctcagccttttatttggaaacagttgaaataaactggcagcagctagatcagagtatcttgctttattttataaaggccaaaggtagtatgaagtttggaccaaaaaggtaaatagatccattccagcacctgatactgatttttcaaggctctatgaaaggtcaaaaatttcattaaacaagaccagttctccctcttccccctgtcccaagaaatcttaggcatgaaaaggataaggaaacagctcctggaatgatacatttgcatagtgccctagtagcaggttgggaaaaagttataatataagaaacaaccttcgaaaacaggccttttatctcaaagataaaatgtctttcttgtggtctttcatcactatctccgtggtggaaggttcccctagttccaacatatttccattaaaatagtcaaagccacggcattgggatgtcagatgcctctctttctttgtggtaatcggaatttaaaattatacagttgcctctgaatttctcatgcacaaagccaaaccactgataagagataaagcagtctgaagcctgctgcttcagccagcacagcacaccacacacgctcgcactttcaaaagcaatgtgatttctatggttcttaaaagctttcttcataagggagtccctgaaatttctcaaggcaggtttgaatggcaaagggaaaataattacttgtgggaggtcctccttttgagtattgttagagcatacatgtaaaagaaaataacctttttggggcaactcatgctcacacatgctgttttctttggttctccccctaccttccttttgtagatattgacagaataggaggaaatgagcatccttatttgagaaagagcaagaatgtcatgagcccttgatgcaatagtaagtgtgatgtcatcatacagtgttaatgatgctatcaaatccatcaataaacagtctcaaaccttccaacaacagtgctcactgctgctcctcaacttcagcccagcaagcagtaatatcatcacccattttgagatatgcaggtggaatagaacaaagaaacagccactgtaatcgagaagcatgtttactgtctaaatccacctgttgcagtaggaagccagagtggggttccaaatgcctcattaagtatgtggacagcctcactagtaagtgagtgaatttggcttcatcactgaacattagctaaggtcagcttaataacacaaatatgaggccgacttctttgcgagaagagaaaagaaaacatctgcttgatttaaaatccaccccacatgcctagagttgtctaatagtccctcactttccaatggcttcacatcctacttctacatttggggttttttggtgaaatcagagatagctcaggatttcataaaacgagaaactccaaactggtctattaggttccatgggaacacttgtagccaaaggattgtctgagggcaggaagacgacacttgtcaacaaggaagacagtgtttctttagttcccatattcatctaattcatggggttctaacattttggggggccatagattcttttgacaatctgagccaatctatgaaacttctccccaaaaagaaccaccccacaaaatcttgcaaaacgtaagagattttcctggatctgaagctacccgaagacatgggaagagttgtattctattattcaattttaagaatatttattaatattcactgagctattgctagccactgtgctaaacattttacatacattctcctatttcatcctcaaaacaatcctttgagttgggttttaatatagttccaatattcggatgtgaaaactgaggcttatagtggctaagaaacttgcccaaagccactacctagaaaatggcagagctggaatgtaggtttaactcctgaccactatgctataaagtcaccacatgtcaaactaattttcaagttgttgggacatgtcccctactaggttttaaactagatcttccttggtagatgaagctatagaacttctattttccctgctttctgtagtctctcacagtgacagcatctatactaaagtatagatacctaaggggaaaatatagaaagcctgcctgaataatagaatctagaacaacaacaaaaatattaattttttctgtgtatgcttaggtcaagcttaaaaaaaaaaaaaaaa

SEQ ID NO: 57242 - DNA, 1063 bp, Homo Sapiens; identical to SEQ ID NO: 29785

SEQ ID NO: 57243 - DNA, 1411 bp, Homo Sapiens
agctgccttgcacagcctcgcaatgagctgccacaactgctccgacccccaggtcctttgcagctccgggcagctgttcctgcagcccctctgggaccacctgaggagctgggaggccctcctacagtcgcccttcttcccggtcatcttctccatcaccacatacgtgggcttttgcctgcccttcgtggtcctggatatcctgtgctcctgggtgcccgccctgcggcgctacaagatccaccctgacttctcgccatccgcgcagcagctgctaccttgcctggggcagaccctctaccagcatgtgatgtttgtgttccccgtgacgctgctgcattgggcccgcagcccggccctcctgccccacgaagctcccgagctgctcctgctgctgcaccacatcctgttctgcctgctactcttcgacatggagttcttcgtgtggcacctgctgcaccacaaggtgccctggctgtaccgcaccttccacaaggtgcaccaccagaactcgtcctcgttcgcgctggcaacgcagtatatgagcgtctgggaactgttttctttgggcttcttcgacatgatgaacgtcacactgctcgggtgccacccgctcaccaccctgaccttccacgtggtcaacatctggctttccgtggaggaccactccggctacaacttcccttggtccactcacagactggtgcccttcgggtggtacgggggtgtggtgcaccacgacctgcatcactctcactttaactgcaacttcgctccgtactttacacactgggacaaaatactgggaacgctgcggactgcatctgtcccagcgcggtgatgtggctgcggtgggtgcccctaagactcgggactgctgtgcctttcacacttgaatgaagagaaacacctgagctatatatttttttaaagcaactaacttattgctttatgtttatctatgaaaaccatagataaaatctgatgcatttttgtaatctgacaaagtaatttacatactgtttgtgtatcaatacaattttgtgttcttggtattcttagtctagctcacctcaatagccttgaatcctgcatatgaattagacattcatcactggcatatttagaatatctctaaaaggacttgtttgtagaataaggaattttctatgtttcaaagtgttctaaaacctggctaaaagaatgtatttttgtggatggtgttgacttctgactctaaaagcaatcaaacatgtttctgctggacagtgaccaagaattatagtaccttcttatatttttttatagaactgtatatttattttgaaagaaatgttattcgtgctttaaaaaggaaaaaaaaccatgaatcaaataaaagaaaaaaaaaaaaaaaaaaaaaaaaaaaaaa

SEQ ID NO: 57244 - DNA, 3409 bp, Homo Sapiens; identical to SEQ ID NO: 31001

SEQ ID NO: 57245 - DNA, 3065 bp, Homo Sapiens
gctgccaggtgagccccgggccaagggtggttgccctgctgaggccgaaaggactcgagcttcccatctcctcgcctcccccaggtctttcaccgtctggactcatctctgggtaactcatggtgtgagtggccacgtggctggctcaggctcagggccctgtccgggggcggcagcgtggcctccccacccccgtcccctgccatgcccaaatacaagctggctgactaccgttatgggcgagaggaaatgctggctctctacgtcaaggagaacaaggtgggtcccggaagagctgcaggacaaggagttcgccgcggtgctgcaggacgagccactgcagcccctggctctggagccgctgactgaggaggaacaggccgcggccgtggtgacagctgcttttaccaaagaagcatcgaagaaggcgatggggcctttggacgaagcccccgggaaatccagcgcagccagagctgggatgacagcacgatgtggctttgaggagggaggggctggcccaaggaaggagcacgcccgctcagacagcgagaactggcgctccctacgggaggaacaggaggaggaggaggagggcagctggaggctcggagcagggccccggcgagacggcgaccgctggcgctccgccagccctgatggtggtccccgctctgctggctggcgggaacatggggaacggcggcgcaagtttgaatttgatttgcgaggggatcgaggagggtgtggtgaagaggaggggcggggagggggaggcagctctcacctgcggcggtgccgagcgcctgaaggctttgaggaggacaaggatgggctcccagagtggtgcctggacgatgaggatgaagaaatgggcacctttgatgcctctggggccttcttgcctctcaagctgttctctgctccccaccccggccccatgcagaagggccccaaggagcccattcctgaggagcaggagctggacttccaagggttggaggaggaggaggaaccttccgaagggctagaggaggaagggcctgaggcagatgatattcgggggatccagctgagtcccggggtgggctcctctgctggcccacccggagatctggaggatgatgaaggcttgaagcacctgcagcagggcatccaggaggcggagaagctggtggcctccctgcaggacagctccttggaggaggagcagttcacggctgccatgcagacccagggcctgcgccactctgcagccgccactgccctcccgctcagccatggggctgcccggaagtggttctacaaggacccacagggcgagatccaaggccccttcacgacacaggagatggcagagtggttccaggccggctacttttccatgtcactgctggtgaagcggggctgcgatgagggcttccagccgctgggcgaggtgatcaagatgtggggccgcgtgccctttgccccagggccctcacctcccccactgctgggaaacatggaccaggagcggctgaagaagcaacaggagctggccgcggcggccttgtaccagcagctgcagcaccagcagtttctccagctggtcagcagccgccagctcccgcagtgcgcgctccgagaaaaggcagctctgggggacctgacaccgccaccaccgccgccgccacagcagcagcagcagcagctcacggcattcctgcagcagctccaggcgctcaaaccccccagttccaggagcgcagagaagtggagctcagggcgaagcgggaggaagaggaacgcaagcgtcgagaggagaagcgccgccagcagcagcaggaggagcagaagcggcggcaggaggaggaagagctgtttcggcgcaagcacgtgggggctgtccatgaagacgctcctggagttgcagctggagggcgagcggcagctgcacaaacagcccccacctcgggagccagctcgggcccaggcccccaaccaccgagtgcagcttgggggcctgggcactgcccccctgaaccagtgggtgtctgaggctgggccactgtggggcgggccagacaagagtgggggcggcagcagcggcctggggctctgggaggacacccccaagagcggcgggagcctggtccgtggcctcggcctgaagaacagccggagcagcccatctctcagtgactcatacagccacctatcgggtcggcccattcgcaaaaagacggaggaagaagagaagctgctgaagctgctgcagggcattcccaggccccaggacggcttcacccagtggtgcgagcagatgctgcacacgctgagcgccacgggcagcctggacgtgcccatggctgtagcgatcctcaaggaggtggaatccccctatgatgtccacgattatatccgttcctgcctgggggacacgctggaagccaaagaatttgccaaacaattcctggagcggagggccaagcagaaagccagccagcagcggcagcagcagcaggaggcatggctgagcagcgcctcgctgcagacggccttccaggccaaccacagcaccaaactcggccccggggagggcagcaaggccaagaggcgggcactgatgctgcactcagaccccagcatcctggggtactccctgcacggatcttctggtgagatcgagagcgtggatgactactgaccagcccggacccccagcccctgggctgtaggccagggcagccacagcggcgtggaccgagggtcccagcctgcaggctccccgcagagagcacaggaagaggcaggggcggggtccccagcacttgttacaaacacacgatgcaccttaactcacccaccacgaggcactttacagactgggggagggggtttttctttttattttttttttaattttaaacgactgaagaaaacattaggagaggcaaaaatattgttaaaaactagactctaaacaccccttcctgctgtgaggatagtgggtgtgacaatggaaggtccacagaggtttttgttttttggtttttttttttttttttaagaaaaaaagatga

SEQ ID NO: 57246 - DNA, 1134 bp, Homo Sapiens
tacacagagagccacggccagggctgaaacagtctgttgagtgcagccatgggggacgtcctggaacagttcttcatcctcacagggctgctggtgtgcctggcctgcctggcgaagtgcgtgagattctccagatgtgttttactgaactactggaaagttttgccaaagtctttcttgcggtcaatgggacagtgggcagtgatcactggagcaggcgatggaattgggaaagcgtactcgttcgagctagcaaaacgtggactcaatgttgtccttattagccggacgctggaaaaactagaggccattgccacagagatcgagcggactacagggaggagtgtgaagattatacaagcagattttacaaaagatgacatctacgagcatattaaagaaaaacttgcaggcttagaaattggaattttagtcaacaatgtcggaatgcttccaaaccttctcccaagccatttcctgaacgcaccggatgaaatccagagcctcatccattgtaacatcacctccgtagtcaagatgacacagctaattctgaaacatatggaatcaaggcagaaaggtctcatcctgaacatttcttctgggatagccctgtttccttggcctctctactccatgtactcagcttccaaggcgtttgtgtgcgcattttccaaggccctgcaagaggaatataaagcaaaagaagtcatcatccaggtgctgaccccatatgctgtctcgactgcaatgacaaagtatctaaatacaaatgtgataaccaagactgctgatgagtttgtcaaagagtcattgaattatgtcacaattggaggtgaaacctgtggctgccttgcccatgaaatcttggcgggctttctgagcctgatcccggcctgggccttctacagcggtgccttccaaaggctgctcctgacacactatgtggcatacctgaagctcaacaccaaggtcaggtagccaggcggtgaggagtccagcacaaccttttcctcaccagtcccatgctggctgaagaggaccagaggagcagaccagcacttcaacctagtccgctgaagatggagggggctggggtcacagaggcatagaatacacattttttgccacttt

SEQ ID NO: 57247 - DNA, 3142 bp, Homo Sapiens
gagtgtttttcttcagttgtgcctcttcctctctaacaggcagatatagacaaagcagtgcaggcagcccgcctggctttctctcttggttcagtgtggagaaggatggatgcttcagaaaggggacgtctgttggataagcttgcagacttggtggaacgggacagggcagttcttgcaaccatggaatccctaaatggtggcaaaccattcctgcaagctttttatgtggatttgcagggcgtcatcaaaacctttcgatattacgcaggctgggctgataaaattcatgggatgaccattcctgtagatggagactattttacctttacaagacatgaacccattggagtgtgtggacagatcatcccatggaacttccccctgctgatgtttgcctggaaaatagctccagctttgtgctgtggcaatacagtagttattaagccagcagagcaaacaccactcagtgcactctacatgggagccctcatcaaggaggctggctttcctcccggggtcatcaatattttgccaggatatgggccaacggctggggcagcaatagcttctcacattggcatagacaagattgcattcacagggtctactgaggttggaaagcttatccaagaagcagctggaagaagtaatttgaagagagtaactctggaacttggaggcaaaagtcctaatattatttttgctgatgctgacttggactatgctgtggagcaggcccaccagggtgtgttcttcaatcaaggtcagtgctgcactgcaggctctcgcatcttcgtggaggagtccatctatgaggagtttgtgagaagaagcgtggagcgggccaagaggcgcgtagtggggagtccctttgaccccaccactgagcagggtccccagattgataagaaacagtacaacaagatcttggaactcatccagagtggtgtggctgagggcgccaagctggaatgtggaggcaaaggactgggccgaaaggggtttttcattgagcccacagtgttttccaacgtcactgatgatatgcggattgccaaggaggagatctttggccctgttcaggaaattttgagatttaagacgatggatgaagttatcgaaagagccaataactcagactttggactcgtagcagctgtctttactaatgacatcaacaaggccctcacagtgtcttctgcaatgcaagctgggactgtttggatcaattgttacaatgccttaaatgcccagagcccctttgggggattcaagatgtctggaaatgggagagaaatgggagaatttggcttgcgggagtactcagaagttaagacggtgacagtaaagatcccccagaagaactcctaagaaggccaagaaggaggatgaagcccagcctgcacgtctgtccctctctgctttctctgtagggcccagctctcaggaatacaaagttgagccacggtccttacttaaagattgaaaagataacatgtaggccaggcaggtcactgcacaactaaagcaaaccagctgggtacagtttcttggcactctgtaaggggccaccttaatcataccaaatattggggaaagtgggataaagggaggaggaggagctagcagacacatccagtatctccttctggagcacaggatgaaataagggagctgtattatttcatgtctttgtcacaaagaactttcctctcaaggaaaggtgacctttctcctgtcttcattttcctccttccaggccctcctcgctcacccacccctccctctcttccaaggagatgtcagctgagctcattctggggcagatgtttgggccgggaacaatttttcaaggttgtaaagccaaattatcatttcatgttatccatttcttcaaagcaaaacatgaaatggttttagctagagtcagaccagaatgaaaatgccaggagctggtacactacagatgtagtaagaacctgggatattcctgacccaatctggttttcttttacccataaataacatgaatgaaaaaagattgggacaatagagactggaagtcatcatgtgcagttcaccgcttctgagcttgctgcagttttggggtgtgtgtgtattagattccttctcagttattctggaataaggcaaggagtgggttgtttttcatagctagataagatcttttccaaagtttttcttagaaccaaccaaaaaacaatccgagtaggcccaagaatttgataatgctggatgccttgcagacatcattcagtttctaatattgggcaacaattattattaaatgaattatttctgtagttggaatctgtaccttctgaacctctacaccaataactgctgcaggtgtgattttggtctgtcacactgtacatctatcataatgtgccctgtatctattggcagtgaccttggaaaatctggccaagcctaggggtttccttttccatttgccaagttccattgtgccaggactgccgtgctccactgagctcctctgtcacaccccattcttgcccctcactgggcaggccatggcctacagcttgcagggagtaaagcaggcccgcctccctttcttcccatccacatactcctcttctgctttccagtgactccaccagtttgatgtgggaagtgttagcttcctttccttcttccatcccttcttccatctttccagctgtcaaatccaatccagtctctaacctaaatgcagatcatttatttaaaagtaccaaacataacccagagtatgtggaatatgggcaacatatatatagccttctgtatttaacgatcttctgcttcttaaccgtaccagttttctatttataactcttatctatccatgatgttttaaagtctccacttgctgttatttacaaacgacagtgcattcagcagcccagtgccgtgagccctgacagatgccgtatttctgagtgcttccatgtgaatgctgccctcctgtagcatgtgtccaagtggacatagccactaaccaactagttacctttggactgcaacaaaaaatgtgaaaatgaagatttatttcttttaatttacttaaaaagaaacctctgtgctagcaataaagcatttatattgtgta

SEQ ID NO: 57248 - DNA, 2165 bp, Homo Sapiens
atggctgtgcgcggcgccaacaccttgacgtccttctccatccaggcgatcctcaacaagaaagaggagcgcggcgggctggccgcgccagaggggcgcccggcgcccgggggcacagcggcatcggtggccgcggctcccgctgtctgctgttggcggctctttggggagagggacgcgggcgcgttggggggcgccgaggactctctgctggcgtctcctgccggtaccagaacagctgcggggcggactgcggagagcccggaaggctgggactcggactccgcgctcagcgaggagaacgagagcaggcggcgctgcgcggacgcgcggggggccagcggggccggccttgcggggggatccttgagcctcggccagccggtctgtgagctggccgcttccaaagacctagaggaggaagccgcgggccggagcgacagcgagatgtccgccagcgtctcaggcgaccgcagcccaaggaccgaggacgacggtgttggccccagaggtgcacacgtgtccgcgctgtgcagcggggccggcggcgggggcggcagcgggccggcaggcgtcgcggaggaggaggaggagccggcggcgcccaagccacgcaagaagcgctcgcgggccgctttctcccacgcgcaggtcttcgagctggagcgccgctttaaccaccagcgctacctgtccgggcccgagcgcgcagacctggccgcgtcgctgaagctcaccgagacgcaggtgaaaatctggttccagaaccgtcgctacaagacaaagcgccggcagatggcagccgacctgctggcctcggcgcccgccgccaagaaggtggccgtaaaggtgctggtgcgcgacgaccagagacaatacctgcccggcgaagtgctgcggccaccctcgcttctgccactgcagccctcctactattacccgtactactgcctcccaggctgggcgctctccacctgcgcagctgccgcaggcacccagtgaacccgcttgggctgaggcagcgagtgattcccgcgctccggctccggaccggcgctgacagctgtaggctgtagcctgcacggggcgccccgccaaggaggcacctggaggtgaaacccagctccagctcccgttagccaggacttgtcccctggcagctgggctgagtctgccctgagggggcgcctttttctaatttgaacagaggcaccctatggcctaggggccctgatcgcccacctgcctggaagcccctgggctctatttattatcatgacaatgttggaattaaattttgattcgaatatgtctgcctgggggtggggttttccctgagcggcaactcctggagaccacatagcctgaatcctcagaatttcaggcctgctgggagctttctgcactaggccacactagttcatggtatccatgctaccaatctatgtgtatctacatatcttttatttttggaaattgcatttgtaaccaaggggtgcgaaaccctggcagtcccaggcagcaccaggccaggggttgatttgaaacgtgaaggattgggttttcaggccctctgctccacccctcctgtgtgtcagagctagggtgggggtgcccgattcgggtgctgaatgtaaggaggggagcctccaagtgtggtgcaagccgggggtctccacatcttccttctctgaagtccaggtacctgcacaagcaggaagcgcctgggagtcccggaaggaggagagcgcacacccaggcagccctctgcggaaactttccttggtttctttttatttgtgtaaaggaggttaagacgtgtcgcacttttcagttgtttgtattcaaatgacgattatttttctactcaatgtgaatatccctggccagcctttccacggcgcccaccgcagtgccgctgcctggccctcagtgtctaccttctgccctctgcgactccagtgctctggcccgggactcccctatccgcccctcacttacccttaaacaggtgatcccacctgtcttgtcaacctcgccgcttttcgcctccttaatggcactgtgcactcaactagagtattaactgtaaaaagatttgtgaagtttggaagctctattcgctgtattttttctttaatttataaacttttagtttaacatgc

SEQ ID NO: 57249 - DNA, 2626 bp, Homo Sapiens; identical to SEQ ID NO: 22392

SEQ ID NO: 57250 - DNA, 1833 bp, Homo Sapiens
agaagagcgggctaagacgccggaggaggtggcggcggctgggagaggcgagggttctggccgattttagcatcgaaactaggagaaataagaatggctgtagaggaacttcagtctataataaagagatgtcaaatcctagaagagcaagactttaaagaagaggattttggcctatttcagttagctgggcaaagatgcatagaagaagggcacacagaccagctattagaaattattcaaaatgaaaagaataaggtcatcatcaagaatatgggctggaatctcgttggtcctgttgttcgatgccttttgtgtaaagataaagaggatagtaaaagaaaagtttattttttgatctttgatttattggtaaagttatgcaatccaaaggaattattgttgggtttgcttgaactgattgaagagccctctggaaaacagatatcccaaagtattcttcttttgcttcagccattacaaacagtgattcagaaacttcataacaaggcatattcaattggattagcattgtctaccctttggaatcagctatctcttcttcctgttccatactcaaaagaacaaatacaaatggatgactatggcctttgtcagtgttgcaaggccttaatagagttcactaagccttttgtggaagaagtcattgataacaaagaaaactcactggaaaatgaaaagttaaaggatgaattactgaaattttgtttcaaaagcttgaaatgccctttgctgacagcacaattctttgaacagtctgaagaaggtggaaatgatcctttcaggtattttgcatcagaaataataggttttttatcagcaattggacaccctttccccaaaatgatttttaatcatggaaggaaaaagagaacttggaattaccttgaatttgaagaagaagaaaataaacagttagcagactcaatggcttctctggcatatctagtatttgtacagggcatccatattgatcagcttccaatggtcttaagcccattgtaccttttgcagtttaatatggggcacattgaagtctttttgcaaagaacagaagagtctgttatctccaaaggattggagctgctggagaatagtttattgagaatagaagacaatagtctactttaccagtacttagaaatcaagagttttcttactgtacctcagggcttagtgaaagtaatgacactttgccccattgagacactgaggaaaaagagtttagctatgcttcagctgtatattaacaagttggattcacaaggcaaatatacattatttagagaacacgtaacaacaaatggtttacaggaccacagttgatttcccttcttgatttggtactttttctcccagagggtgcagaaacagatttactgcaaaactcagataggattatggcttcattaaatttattgaggtatttggttatcaaagataatgaaaatgacaatcaaactggattatggacagaacttggaaatattgagaataatttcttaaagccacttcatataggacttaatatgtcaaaagcacattatgaagcagaaattaaaaatagccaagaggcccagaaatctaaagatctttgttctataactgtaagtggagaagagatccctaatatgcctcctgaaatgcagcttaaggtcctgcattcagctcttttcacatttgatttgattgaaagtgttctagctcgagtggaagaactcattgaaataaaaacaaagtctacctctgaagaaaatattgggataaagtgaaagttccatttcctaaataaaaactaataaaatatagtac

SEQ ID NO: 57251 - DNA, 2057 bp, Homo Sapiens
ccccgagcggctcaggtgtcctgtcgtgctcacctgcgccggtcgctggaccgcggggcgctaaccctggagagcccaggagcgggcgggacatggactgcgtgatctttgaggaagtggctgtgaacttcaccccagaagagtgggcattgctggatcatgctcagaggagcctctacagagatgtgatgctggagacctgcaggaaccttgcctccttggattgttacatttatgttagaaccagtggatcaagttctcagagggacgtttttgggaatggaatatccaatgatgaagaaattgtaaagttcacaggaagtgattcctggtctatttttggagaaaattggagatttgataacactggagatcagcaccaaatcccacagaggcatctgagaagtcagctggggagactctgtgaaagtaatgaaggtcatcaatgcggagagaccttgagccagactgcgaaccttcttgtgcacaagagttaccctaccgaagctaaaccctctgagtgcactaagtgtggcaaagccttcgagaatcggcagagatctcacactggacagagaccgtgtaaggaatgtgggcaagcctgcagctgcctctcctgccaaagccctcctatgaaaacgcagactgtagagaaaccctgtaattgccaggactcaaggacagcatctgtgacatacgtgaaaagtctcagcagtaaaaagtcttatgaatgtcagaaatgtggaaaagctttcatttgtccctcatctttcaggggacatgtgaatagtcatcatgggcagaaaacccatgcatgtaaagtatgtgggaagacctttatgtattactcctaccttacacggcacgtaagaactcacacaggagagaaaccctatgagtgtaaggagtgtgggaaagccttcagctgtccctcgtactttcgagaacatgtcagaacacacactggagagaaaccgtatgaatgtaagcattgtggaaaatcattcagctgttactcctcctttagagatcacgtgaggacgcacactggagagaaaccctgtcagtgtaaacattgcggaaaagcgttcacttgttactcgtctcttcgagaacatgggagaacgcacagtggagagaaaccctatgaatgtaaggaatgtggcaaagccttcaggtacccctcctctctgcgagcacacatgagaatgcacaccggagagaagccctatgtgtgcaagcagtgtgggaaggccttcggatgtcccacttactttagaagacatgtgaaaacacacagcggggtgaagccctatcaatgtaaagagtgtgggaaagcctacagtttttcctcctcccttcgaatccacgtgaggacgcatactggagagaagccctttgagtgtaagcattgtgggaaagccttcagctgtcactcctcccttcgagagcatgtgcgaacccacagcggagagaaaccgtacgaatgtaatcaatgtgggaaagccttcagccacgctcagtactttcaaaagcatgtgagatcacacagtggggtcaaaccctacgaatgtactgaatgtgggaaagcctacagttgttcctcgtcccttcgtgtgcacgtgagaacgcacactggagagagaccgtatgaatgcaagcagtgtgggaaaaccttcaggtatctcgcatcgcttcaagcacatgtgagaacacatgctggagcgtgaatctacaaatacagtggacctgggagagtgttcaaccgtaaaaccttgttgtaaatgtgagaaacgttatttatgtagagcatgtaggaaaacctggtatagcacttattttgtacctaaaaattcagagtaggagagaaatctcttaattatgattaatatggtattgcctttacatgcctcagccttaatagtgattccttttgtattaatttctagtgtatgtttgtgatataaacatttaataaatatcctgttttgtacgctttcaaaaaaaaaaaaaaaaaaaaaaaaaaaaaaaaaaaaaaaaaaaaaaaaaaaaaaaaa

SEQ ID NO: 57252 - DNA, 2459 bp, Homo Sapiens; identical to SEQ ID NO: 29477

SEQ ID NO: 57253 - DNA, 5242 bp, Homo Sapiens
gccgcggcggtggcggagactgtggctttaagagcgtgccgggagcccgagccccagccgggccgcgcttcgccgctgcgcaccccagcggagccaagccccacgctggccggacagggccgcctgtcgccgggctgctgagaactagccctagacctctgcgtgagggttcttctgccgaagacatcaccagtgtgtggagcctgccacacccacccgctgccaaaccacggcctttacctgtgtcttccggtgtttcccgtgcgacccatcctgtgggagtgcctcgtgggctgccccagagttcaccccacactcagcagcaccaatggtgaagatgacaagatcgaagactttccaggcatatctgccctcctgccaccggacctacagctgcattcactgcagagctcacttggccaatcatgatgaactaatttccaagtcattccaaggaagtcaaggacgagcatacctctttaactcagtagttaatgtgggctgtgggcctgcagaagagcgagtgttgctaacaggactgcatgcagtcgcagacatttactgtgaaaactgcaaaaccactctgggctggaaatacgaacatgcttttgaaagcagccagaaatataaagaaggcaaatacatcattgaactagcacacatgatcaaggacaatggctgggactgattggacagcatctacccaacccagtgtccacgtgaacgccattcaaccgaacattcttcccaagcgtgagagagtgactgacacttggttccatccatttaggggccttgccatccggggcatcctcccaccctgacgccatctttctggtgaccggcctctaaatcgctgtctctctgtctctttgctttgtatctgtttgtgagttgatcctggcttctctctctgttctagttttggctgaaaacaaaacaacaaaaggaacagatccttgaccgcatggcggcagcccaccttggtaagggccccagggcccatgcgagagctgcctgatggcctcttgtcaggagagcagtggcacgggggcgtgaggaagagggaaaggggaaactctaagggtcctggcgcggggaaggggtggaagggtggaggtaggaacaaaattgcgccgctcctggagacctgataacttaggcttgaaataattgacttgtctaaaaggacaaagagaaaaaaaaaatacctcatgactgcattctctctgactagaagcttctgttcctgacaccaaatgtgccaggttagcaaatgagcacaagatgtggccctgattctagttggtggggcaagggcctggttctcctgggctgagtgggggagtgtcctggcagcagcgagtgacctgggcagtggccaggtgggtgcgatgactctgatgcctcactcagtctctgggcaatcatcatctttgcctctagccaccgtagataaggtgtgaagggactgctgtttgcaatgggcttaccatccaaatatcccaaaggctttgaccagcaaccaagtaaaatcagtaattgaggagagcagggcacaaaggggctgcagtttgggagctcctgaagaaatggctcagatattgagtcagagaaataaaaagtaggatcagttagcaattctaactgcccttccttctgacccctcataagaggagtgtggtgagggaggggactgggtaggggtcatcccaggaggaggggtttacattggaaccagttcaggttcggtgcatctttcctcttcggttttacagtggcttccgtgggatcgtcaatttcttgttcttagagtttcgggtgtttttctccagtcttgttactgtagactgtagaaagcacgggccccaggctctgagcttagtaataacctggctggtagattcctcatgcccctaattgtcccacttaggcctgaatgtcttgcatggagagaaatctcctgtcagtgtggtccagcagcagggaggagttctgcccaaattccgatatcaccccttcccccatccaagcatccttcgattagggaagtggagagcacatccctgtaaggcccataagagaaagaggagtttgttacatttaatcaacactgtgaagtctgttctacagcaattcagccattacacagtatatgactgaaactcatttaactgggttaatttcatttcttagactgaatatattattgttaagatacgtgtgcgtgttaggtaattctcagcatctcctccaagtaggccgaccttctcggaaaattcaccctaaaagtctcacaaaagaatgagttcatggggagattctgtaaagtgatgaactgagatgaaagcagccaacagcccaggagcttttcagaatagcgtctgcagcagaaccagtttccattcagagcgcgtccttggtggaaatgcttttttgtgtgtctccacgcgctgatggtggaatgggagccccaagacgtgtgggcttagaaatcaacttttgttccccaaggcttcttgtccagatctttccagtgctttcatagccctgggagatcaagttgttctccccactttactgcaaggtagactgaagttcagaagaaatactgaatttctgctcccagaagaatagtttctctggctcacaggcccaagttctcaatgaaatcgttttttaactttcacattcctaagctggcttcccggcacagaagccatggatttcccctctctcccttccccctcctcaaggaaatagtcttcctttatggattttcattggactctttcctcagcgattgtcctggctgtttattgatagtccttcccataagaaaatggggttaaacatggggtaggtattttgtctttcaaactacaaatggaatgtggtgacataaactagacatggggtgccctcaagtttccaaggggaccaatgtgccactgttcttccttggggatgaggcctttgactgttggatggatcagagcaggctccagtcagaccctggttctgaatgttttttttttcggtgactatccagtgagccttcagtgggtgcaaggcgccatacttgctgtgagagagctgagtagagtgttggtttttccataactacagggggaaaaaaagtcattaggctttccctttgtgtcagtgaaaccaaaagtgcttcttacaacgttcgctctgttcatgggttgtctatctaacattgagcagcattggagaggccacagctgagctatggagatgctaaattaactcatggcctcagtcagttcattctttaatttcctcaccaaattattgacttagagcataaccaaagacctcattcattcaccccaggtgggttggggtaattggagtttgttggtgaagtttgggggcggggtgttgggagtagagacagggtaaggggacgtgagaaaggaaaaggcatgaagttctatacctcagccagcagctgccttcgtttggaactgaagtccagccagcagactctctagctccatctcccctgtgccaccctaggtcatatgaccttggccaccttggagtagacccagacccctcgggacccgggacattagtctcaggctgctgatggattgatttgacatgaaccaaacacagccaaactcgatacccacaagctgtcagctgaacctgactgagtgttcttcctgagttcacgaggataggctagagtgcatttttactggtggatcagtgtgtgcgaaagagatgaccctttataaagagattttcaagtggatatatataaaagaaacagttgcttgtaaaatatacttttgtaaataatatttaattttttaaataatatatttggtgctgttttctcagatcccctgagagcactttttattttccttttaaattctatggtttcctttgcatttcttgaagtatattttaagggaaacagtgatcaccaatacatgttttcagttttttttttttttaaggtctctatcactttaatctggatcaaggctttgaagcaatgcctctctgcattttttccccagtggaacagactctgcagtacattaatcaggttgagaattgaaatattttcttgcatcagtattggctagaaaagaaaataaataaaaccaagttaatttagtagtaacaacttacagtgattcttcctgttggaagaatttccaacaaatcagaatcacgtttttagttgtgcgtgtgcgcgcacacgtgtgtaaaaagcactttcgattgtgcctcctgttttctcgagtggggacactttaactacagtttacacctcgggcgcataaagtttttcttctctttctctctggttgtttctgtttctgagtggaccaacagcagaacccacgaggatttgttttgagtatggagctgttgcgggtttgctcctttttcttgctttgcgtgctcagtttttacagactgtaaaggagatgtgttgtttgtgaagatggagcagagtcaaatctgtgcttctaactgagatgagagtgtattaatcacgtatcgcagggctccagctgttttagaagccacatcatgttaaacattaactggtttggattaaaagaacattaatattataatacacatatcttagtggtaaacagctttttttttttaaggtcagattgcctcaggtttagaaagaggctgagaaatcaaatcttgaacacaatcaacttacatattttaaaggaatctgcctcaaatgagaaaatatgctagttatctagatagaggaaagagatatttacttttttaaaaattaaaatagttatgaaatctggcagaaaaggtaaagcctagaagaaactatgaaagctattctcatgttaccaaattctatctgcgcatatgtttttgtataacatttcggtgacagtgggagtcggttccctttcccaacctgcagagactatcttccaatacagaatctgtctatttatgcttgtgtttacaaactgtatttgttgggtttgggtttttgttttctttggtggcatttttcaggtcactttgcttctataacaaaggtaattgttttcaaataatttgtcttcaccttttcctgtatttgtacatagtgattcagtattagagaaaagtgcattgtttctgtcatatttccaatctgtgttggtgctcatttgagaaaataaaagttttcaaatattaactcttaaaaaaaaaa

SEQ ID NO: 57254 - DNA, 1602 bp, Homo Sapiens; identical to SEQ ID NO: 25504

SEQ ID NO: 57255 - DNA, 3129 bp, Homo Sapiens
cagaatccaggggacggttgctgagcgggcctgggacagcgggtcgcggcacctccggcctgcgcgtgtctaatccgtctgtcgggtcccgaaagagctaagccgagcctgcgccggacgggtgggctggactgagagaattctctgagctggtgacaggtgccacaggcactggggatctcaccagaaaggaaccgacggagctaggggccagcgagatggcggacgaggccttagctgggctggatgagggagcccttcggaagctgctggaggtcacagcagatctggcagagcggcggcgcatccgctcagccatccgggaactgcagcggcaggagctggagcgcgaggaggaggccctggcatccaagcgtttccgtgccgagcggcaggacaacaaggagaactggctgcactctcagcagcgggaagctgagcagcgggctgccctggcacggctggcagggcagctggagtccatgaacgatgtggaggaattgactgcactgttgcgaagcgctggtgagtatgaggagcgcaagctgatccgagctgccatccgccgtgtacgggctcaggagattgaggctgccaccttggctgggaggttgtacagcgggcgtcccaacagtggctcaagagaggacagcaaggggctagcggcacacaggctggaacagtgtgaggtgccagagcgagaggaacaggaacagcaggcagaggtttcaaagccaacccccacccctgaaggcaccagccaggatgtgaccacagtgacactcctgctgcgagccccacctgggagcacatccagctcacctgcctcacccagcagttcacccacccctgcctctcctgagcctccattggagcctgccgaggcccagtgccttacagctgaggttccaggcagcccagagccaccccccagcccacccaagaccaccagccctgagcctcaggagtctccaacgctccccagcactgagggccaggtggtcaacaagcttctgtctggccccaaagagacccctgctgcccagagccccaccagaggcccctctgacaccaagagagcagacgtggctggaccccgaccctgccaacgctccctgtcggtgctcagcccccgccaaccagcccagaaccgagagtccaccccccttgccagcggaccttcctcattccagcgggctggctctgtgcgggatcgtgtccacaagttcacatctgattctcctatggctgctaggctccaggatggcacaccccaggctgccctaagtcccctgacccccgcaaggctcctgggcccctccctcaccagcaccacccctgcctcctcctccagcggctcctcctctcggggccccagtgatacctcctcccggttcagcaaggagcaacgaggagtagcccagcccctggcccagcttcgaagctgcccccaggaggagggccccagggggcggggcttggctgctaggccccttgaaaacagagcaggggggcctgtggcacgttcagaggagcctggtgccccgctgcccgtggccgtcggcactgccgagccagggggcagtatgaagaccacattcaccatcgagatcaaggacggccgtggccaggcctccacaggccgggtgctgctgcccacaggcaaccagagggcagaactgacactggggctgcgggcgcccccgaccctactcagcaccagtagtgggggcaagagcaccatcacccgtgtcaacagccctgggaccctggctcggctgggcagtgtcactcatgtcaccagcttcagccatgccccccccagtagccgaggaggctgcagcatcaagatggaagcagagccagcagagcctctcgctgcagcagtggaagcggccaatggggctgagcagacccgagtgaacaaagcaccagaagggcggagccctctgagcgctgaggagctgatgactattgaggatgaaggagtcttggacaagatgctggatcagagcacggactttgaagagcggaagctcatccgggctgcacttcgtgagctccgacaaaggaagagagaccagcgggacaaggagcgggaacggcggctgcaggaggcacggggccggccaggggaggggcgcggcaacacagccactgagaccaccacgaggcacagccagcgggcagctgatggctctgctgtcagcactgttaccaagactgagcggctcgtccactccaatgatggcacacggacggcccgcaccaccacagtggagtcgagtttcgtgaggcgctcggagaatggcagtggcagcaccatgatgcaaaccaagaccttctcctcttcctcctcatccaagaagatgggcagcatcttcgaccgcgaggaccaggccagcccacgggccggcagcctggcggcgctcgagaaacggcaggccgagaagaagaaagagctgatgaaggcgcagagtctgcccaagacctcagcctcccaggcgcgcaaggccatgattgagaagctggagaaggagggcgcggccggcagccctggcggaccccgcgcagccgtgcagcgatccaccagcttcggggtccccaacgccaacagcatcaagcagatgctgctggactggtgtcgagccaagactcgcggctacgagcacgtcgacatccagaacttctcctccagctggagtgatgggatggccttctgtgccctggtgcacaacttcttccctgaggccttcgactatgggcagcttagccctcagaaccgacgccagaacttcgaggtggccttctcatctgcggagatgctggtggactgtgtgcccctggtggaggtggacgacatgatgatcatgggcaagaagcctgaccccaagtgtgtcttcacctatgtgcagtcgctctacaaccacctgcgacgccacgaactgcgcctgcgcggcaagaatgtctagcctgcccgcccgcatggccagccagtggcaagctgccgcccccactctccgggcaccgtctcctgcctgtgcgtccgcccaccgctgccctgtctgttgcgacaccctcccccccacatacacacgcagcgttttgataaattattggttttcaacg

SEQ ID NO: 57256 - DNA, 1861 bp, Homo Sapiens
actgtggcgtgggagcatctacaaactcctgtggcgagagctgctctgcttccttgggttctacatggcgctgagtgctgcctaccgctttgtgctgaccgaagggcagaagcgctacttcgagaagcttgtgatttattgtgaccagtatgccagcctcatccctgtctccttcgtgcttggcttttatgtgacgctggtggtgaaccgctggtggagccagtacctatgcatgccgctgcccgacgcgctcatgtgcgtggtggcgggcaccgtgcacggacgcgacgaccgcggccgcctctaccggcgcacactcatgcgctacgcagggctctcggccgtgctcatcctgcgctccgtcagcaccgcggtgttcaagcgcttccccaccatagaccacgtggtggaggctgggtttatgacccgcgaggagcgcaagaagtttgaaaacctgaactcatcctacaacaagtactgggtgccctgcgtctggttctccaacctggcggcacaggcccgacgcgagggccgcatccgcgacaacagcgcccttaagctgctgctcgaggagctgaatgtttttcggggcaaatgtggaatgctctttcactatgactggattagcgtacccctcgtgtacacgcaggtggtgaccatcgcactgtacagctacttcctggcttgcctcattggtcgccagttcctggacccggctcagggttacaaagaccacgacctagacctgtgtgtgcccatcttcaccctcttgcagttcttcttctacgccggctggctcaaggtagctgagcagctcatcaaccccttcggagaggacgatgatgactttgagaccaactttctgatcgatagaaacttccaggtgtccatgctggcagtggacgagatgtatgatgacctggctgtgctggagaaggacttgtactgggatgcagccgaggctcgcgccccatacacagcggctactgtcttccagctgcggcagccttccttccagggctccacctttgacatcacgctggccaaagaagacatgcagttccagcggctggacggcttggatggaccgatgggaggggcgcccggcgacttcctgcagcgcctcctgccggcgggcgcgggcatggtcgcgggaggcccgctggggcggcgcctgtcctttctactccgcaagaacagctgcgtgtcggaggcgtctactggggccagctgctcatgcgcggttgtccccgaaggcgcggccccggagtgcagctgcggggacccgctgctcgaccccggcctgccggagcccgaggccccgccccctgcgggtcccgaaccgcttaccctcatccctgggcctgtcgagcccttcagcatcgtgaccatgcccgggccccggggtccggcgccaccctggctgcccagccctattggcgaggaggaggagaatctggcctgagatcttagagcccagccccctaaggacagggaaccaggtccctgcacggcacccacgcaggtgtcccggtctgcataagcctcgtatgcctttgtaaagtccacctacacttttgaccagctctcgctgcccgcatgtgtttggcgctgtgctaggggcgggagttcttccagactcttggaccagcccgccctgaccaccagctctacttcccaacccccactgcctgagaggtctctatcagtgtcctgcctgaattctttccttcaagtgaagatgtgactgactacctcctcgagttgtcatgaggatgaaagaatggcattaaagcatttggtatacagtaggtgctcaataaattgctagtgatttttactcaaaaaaaaaaaaaaaaaa

SEQ ID NO: 57257 - DNA, 2273 bp, Homo Sapiens
aattctcgcccaaggacagacctgaatctctagctgcctagaggctgactcaactgaaatcatggcgtttgacagcacttggaaggtagaccggagtgaaaactatgacaagttcatggaaaaaatgggtgttaatatagtgaaaaggaagcttgcagctcatgacaatttgaagctgacaattacacaagaaggaaataaattcacagtcaaagaatcaagcgcttttcgaaacattgaagttgtttttgaacttggtgtcacctttaattacaacctagcagacggaactgaactcagggggacctggagccttgagggaaataaacttattggaaaattcaaacggacagacaatggaaacgaactgaatactgtccgagaaattataggtgatgaactagtccagacttatgtgtatgaaggagtagaagccaaaaggatctttaaaaaggattgagcattattcttggcgcacagtccaaaatacaaattggacagaagatctatattgtaccagaactatttatttcaccccatcaagtataaggttactgattgattggtccttttataaacattggtatatttccattcatgccaaagcaaaagaagtaaaagctaattaggatttaatttgttttatattctctaagatatatatttactaaaagaatttgtgacattttaaaaaacaaaaataaatattgcgtccatgctgctttatatgtagccttgccttttaaaagaaaaagtatgtgaatatgaattgacagactgttttcgtagagagagggtcttactctttcactcaggctggaatgtagtggagagatcatagctcactgtaacctcaaactcctggactcatgcaatcttcctgcctcaggcttctgagtagctaggactatgggtacattccacagtgcccagctaatttttgttttgttttctttttattttttttagagatggggtcttgctatattgcccaggctggtcttgaacccctggcctcaagcaatcctcctgcctcagcctctcaagttgttttttttctttacatttgataaactaaaagcataggctgcatatgagtctttaacatcttgaactggttgtgaataattttctggcactggttgtaagtaatatctattattataaaaataatatatgctcagccagaaaacttagaaataagaaacacaaatgtaaaataagtatttccataactcataatccagagataattgccattctgattttgatagatatcctctcagctctcttccctgggggcagatatttcccaatacataccactttgaataggatgataggaaataaatgatgtactacattaaattaaattattgtattacatttttgtacacatcagtcattcccacgcttggctgaaaatcaggatcatctgagaaacttaaacaatttctgcattcttaatctccactgttattctattatatcagaatcgctaatagaaccaagaattctagaaaatttcctggtgattctgatgcagcctgtccactaacttgtctttgagaacaatggagatatcagttatcaatgttatttttaaccacccccttcttttttgttgttgtgggttttttcacataaacacatacattgccaattttccagggctcaaaaagtttccttttattcatattttcacatgacgtaaaattttatgtgcttcacataattgtattttagcagggtacatattaggggatggagagggggtacaatttttaagcatttgcagctgcaactctatagacttttgacaaattctttttcacactgatgtagataacagcttaacatttacatagttcttactacttgccacacactgttctaagtggtatatacatatgacatatatattaaaatgtaggaagaaaaatgtttgagtacctgatgaaaatgaatagagagtatgtaatctttgaaagctgaatactgcgtgttctcacttataagtgggagctaaataatgtatacacatggacacaccagagtgtagaataatagacactggagacttggaagagttggagggttggcagggggcgatgataatttacttaatgggtacaatgtacattattcagggggtgatggttacagcccagactttaccactatgcaatatatcaatgtaacaaaactatacttgtactccttaaatttatataaaaataccttaaatctaaaaaaaaaaaaaaaaaaaaaaa

SEQ ID NO: 57258 - DNA, 1334 bp, Homo Sapiens
ggaacttgcctcatgtgtgtgtatgtgtgtgtgtgtgattgtgggtgtgggtagtttaacctttttatatcttagctgcctgtaaactcagtgattgctacgttcagatcaaaccttgaacttttttttctggtgccaggagccttcctgtgctccccattgcctgccagaaccaccaccgtttcccatggttactctacagcagcttcactgcctgaaaatgaaaactgaacaaagggattaaattgtgagaacaactgtcaatctattatatatttgtacaatctggtattaaaatgctttccccaaaagatattctgcgaaaagatctgaagttggtccatggttatcccatgacctgtgcttttgcaagcaactgggaaaaaattgaacagttccatagcagaccagatgacattgtgatagccacttatcctaaatcaggtactacttgggttagtgaaattatagacatgattctaaatgatggagatattgaaaaatgtaagcgaggttttattactgaaaaagttccaatgttggaaatgactctccctggattaagaacatcaggtatagaacaattggagaagaatccatcaccccggattgtgaaaacacatctaccgactgatcttcttcctaaatctttctgggaaaacaattgcaagatgatttatctggctcgtaatgccaaggatgtttcagtctcatattaccattttgacttaatgaataatttacagccttttcctggtacctgggaagaatatctggagaaattcttaactggaaaagtggcctatggttcctggtttactcatgttaaaaactggtggaagaaaaaggaagaacacccaatactttttttgtactatgaagatatgaaagagaatccaaaggaggaaatcaagaagatcattagatttctagagaagaacctgaatgatgagatcttggataggatcatccatcacacctcatttgaagtgatgaaggacaatcctttggtaaattatacacatctaccaactacagtgatggatcatagcaaatccccttttatgcgtaaagggacggctggtgactggaagaattacttcaccgtggcccaaaatgagaaatttgatgctatttatgagacagaaatgtccaaaactgcacttcaattccgcacagagatttaaagtgtctaagtcacaaatctgaagaaataagagattgtctgtagttgattgaaacgagggcagttatgaattgatttgggcaatcaaatgaatttataaaggagaataatatgcttttaaaaaaaaaaaaaaaaaaaaaaaaaaaaa

SEQ ID NO: 57259 - DNA, 3119 bp, Homo Sapiens
gaagctccacaccagccattacaaccctgccaatctcaagcacctgcctctacagttggtacagatggcattgtcccagtctgttcccttctcggccacagagcttctcctggcctctgccatcttctgcctggtattctgggtgctcaagggtttgaggcctcgggtccccaaaggcctgaaaagtccaccagagccatggggctggcccttgctcgggcatgtgctgaccctggggaagaacccgcacctggcactgtcaaggatgagccagcgctacggggacgtcctgcagatccgcattggctccacgcccgtgctggtgctgagccgcctggacaccatccggcaggccctggtgcggcagggcgacgatttcaagggccggcctgacctctacacctccaccctcatcactgatggccagagcttgaccttcagcacagactctggaccggtgtgggctgcccgccggcgcctggcccagaatgccctcaacaccttctccatcgcctctgacccagcttcctcatcctcctgctacctggaggagcatgtgagcaaggaggctaaggccctgatcagcaggttgcaggagctgatggcagggcctgggcacttcgacccttacaatcaggtggtggtgtcagtggccaacgtcattggtgccatgtgcttcggacagcacttccctgagagtagcgatgagatgctcagcctcgtgaagaacactcatgagttcgtggagactgcctcctccgggaaccccctggacttcttccccatccttcgctacctgcctaaccctgccctgcagaggttcaaggccttcaaccagaggttcctgtggttcctgcagaaaacagtccaggagcactatcaggactttgacaagaacagtgtccgggacatcacgggtgccctgttcaagcacagcaagaaggggcctagagccagcggcaacctcatcccacaggagaagattgtcaaccttgtcaatgacatctttggagcaggatttgacacagtcaccacagccatctcctggagcctcatgtaccttgtgaccaagcctgagatacagaggaagatccagaaggagctggacactgtgattggcagggagcggcggccccggctctctgacagaccccagctgccctacttggaggccttcatcctggagaccttccgacactcctccttcttgcccttcaccatcccccacagcacaacaagggacacaacgctgaatggcttctacatccccaagaaatgctgtgtcttcgtaaaccagtggcaggtcaaccatgacccagagctgtgggaggacccctctgagttccggcctgagcggttcctcaccgccgatggcactgccattaacaagcccttgagtgagaagatgatgctgtttggcatgggcaagcgccggtgtatcggggaagtcctggccaagtgggagatcttcctcttcctggccatcctgctacagcaactggagttcagcgtgccgccgggcgtgaaagtcgacctgacccccatctacgggctgaccatgaagcacgcccgctgtgaacatgtccaggcgcggcgcttctccatcaattgaagaagacaccaccattctgaggccagggagcgagtgggggccagccacggggactcagcccttgtttctcttcctttctttttttaaaaaatagcagctttagccaagtgcagggcctgtaatcccagcattttgggaggccggggttggaggatcatttgagcccaggaattggaaagcagcctggccaacatagtgggaccctgtctctacaaaaaaaaaatttgccaagagcctgagtgacagagcaagaccccatctcaaaaaaaaaacaaacaaacaaaaaaaaaaccatatatatacatatatatatagcagctttatggagatataattcttatgccatataattcaccttcttttttttttttgtctgagacagaatctcagtctgtcacccaggttggagtgcagtggcgtgatctcagctcactgcaacctccacctcgcaggttcaagcaatcctcccacttcagcctcccaagcacctgggattacaagcatgagtcactacgcctggctgatttttgtagttttagtggagatggggtttcaccatgttggccaggcttgtctcgaactcctgaccccaagttatccacctgccttggcttcccaaagtcctgggattacaggtgtgagccaccacatccagcctaacttacattcttaaagtgtcgaatgacttctagtgtagaattgtgcaaccatcaccagaattaattttattattcttattatttttgagacagagtcttactctgttgccaggctggagtgcagtggcgcgatctcagctcactacaacctccgcctcccatgttcaagcgattctcctgcctcagcctcccgagtagctgggactatagatgcgccaccatggccagctaatttttgtatttttagtagagacgaggtttcactgtgttggccaggatggtctccatctcttgacctcgtgatccacccgcctcagcctcccaaagtgctgggattaacaggtatgaaccaccgcgcccagcctttttgtttttttttttttgagacagagtcttcctctgtctcctaagctggagtgcagtggcatcatctcagctcactgcaacctctgcctcccaggttcaagtgcttctccagcctcggcctcccaagtagctgagactacaggcacacaccaccacgcctggctaatttttgtatttttggtagagacgggtttcaccatgttggtcagactagtctcaaactcctgacctcaagtgatctgcccgcctcgacctctctcaaaatgctggcattacaggtgtgagccacggtgcccggcccacaattaattttagaacattttcatcacccctaaaagaaaccctgcacccattagcagtccctccacatttccccctagcctgcctcccctgcctcaccagccctggcaactgctaatctactttctgtgtctatggatttgccttctctaaacatttcatataaatggaattacacaatg

SEQ ID NO: 57260 - DNA, 2690 bp, Homo Sapiens
agcagacaccagcactgctctttctccaagacggccggccatgctctcctcctctgccagtctcctccaccactctctaacctgagagcctgtggaacctgcccgtctcccctcctccatcagacacacctgcctaggaaacaggaaaggacctcggaagtcttctaaggagagtcatggcgtattaccaggagccttcagtggagacctccatcatcaagttcaaagaccaggactttaccaccttgcgggatcactgcctgagcatgggccggacgtttaaggatgagacattccctgcagcagattcttccataggccagaagctgctccaggaaaaacgcctctccaatgtgatatggaagcggccacaggatctaccagggggtcctcctcacttcatcctggatgatataagcagatttgacatccaacaaggaggcgcagctgactgctggttcctggcagcactgggatccttgactcagaacccacagtacaggcagaagatcctgatggtccaaagcttttcacaccagtatgctggcattttccgtttccggttctggcaatgtggccagtgggtggaagtggtgattgatgaccgcctacctgtccagggagataaatgcctctttgtgcgtcctcgccaccaaaaccaagagttctggccctgcctgctggagaaggcctatgccaagctgctcggatcctattccgatctgcactatggcttcctcgaggatgccctggtggacctcacaggaggcgtgatcaccaacatccatctgcactcttcccctgtggacctggtgaaggcagtgaagacagcgaccaaggcaggctccctgataacctgtgccactccaagtgggccaacagatacagcacaggcgatggagaatgggctggtgagtctccatgcctacactgtgactggggctgagcagattcaataccgaaggggctgggaagaaattatctccctgtggaacccctggggctggggcgaggccgaatggagagggcgctggagtgatgggtctcaggagtgggaggaaacctgtgatccgcggaaaagccagctacataagaaacgggaagatggcgagttttggatgtcgtgtcaagatttccaacagaaattcatcgccatgtttatatgtagcgaaattccaattaccctggaccatggaaacacactccacgaaggatggtcccaaataatgtttaggaagcaagtgattctaggaaacactgcaggaggacctcggaatgatgctcaattcaacttctctgtgcaagagccaatggaaggcaccaatgttgtcgtgtgcgtcacagttgctgtcacaccatcaaatttgaaagcagaagatgcaaaatttccactcgatttccaagtgattctggctggctcacagcggttccgggagaaatttccacccgtgtttttttcctcgttcagaaacactgtccaaagctcaaataataaattccgccgcaacttcaccatgacttaccatctgagccctgggaactatgttgtggttgcacagacacggagaaaatcagcggagttcttgctccgaatcttcctgaaaatgccagacagtgacaggcacctgagcagccatttcaacctcagaatgaagggaagcccttcagaacatggctcccaacaaagcattttcaacagatatgctcagcagaggctggacattgatgccacccagcttcagggccttctcaaccaggagcttctaacaggacctccaggggacatgttctccttagatgagtgccgcagcttggtggctctgatggaactgaaagtgaatgggcggctagaccaagaggagtttgcgcgactgtggaagcgccttgttcactaccagcatgttttccagaaggttcagacaagccctggagtcctcctgagctcggacttgtggaaggccatagagaatacagacttcctcagagggatcttcatcagccgtgagctgctgcatctggtgaccctcaggtacagcgacagcgtcggcagggtcagcttccccagcctggtctgcttcctgatgcggcttgaagccatggcaaagaccttccgcaacctctctaaggatggaaaaggactctacctgacagaaatggagtggatgagcctggtcatgtacaactgaagcaaagaggaaagcagacccatggctcaggacaagctcccagtgatcactcaagaatctggctctcattctaagaggctgtgctgcccagtatggtggttgtgataaatctaaaccagccctgcatgaaacagagtccaagctgtctcccaacagcctgggttcggtccttggctggcccaggcccagttaagcctgtggccaccaagcagctcatctgagcactttgggatgtattcagcctacgttgccctggaaaaggaagcaggagatgtctccctgtgggaaaggagaagagaagttgtctctgagtcccctgtcaccagttggattcatttcttggaagagccagaatgagccactttgaccaccctcgggtgctatgggtgacacaagagctgtccactgggtgtttgcagaataattacactatcttatgtctggatcctgatgatttcacagctaaatggcaaaaataaaacatgtttcccataaaaaaaaaaa

SEQ ID NO: 57261 - DNA, 2385 bp, Homo Sapiens; identical to SEQ ID NO: 31057

SEQ ID NO: 57262 - DNA, 475 bp, Homo Sapiens
acacatctgctcctgctctctctcctccagcgaccctagccatgagaaccctcaccatcctcactgctgttctcctcgtggccctccaggccaaggctgagccactccaagctgaggatgatccactgcaggcaaaagcttatgaggctgatgcccaggagcagcgtggggcaaatgaccaggactttgccgtctcctttgcagaggatgcaagctcaagtcttagagctttgggctcaacaagggctttcacttgccattgcagaaggtcctgttattcaacagaatattcctatgggacctgcactgtcatgggtattaaccacagattctgctgcctctgagggatgagaacagagagaaatatattcataatttactttatgacctagaaggaaactgtcgtgtgtcccatacattgccatcaactttgtttcctcatctcaaataaagtcctttcagcaaaaaaaaaaaa

SEQ ID NO: 57263 - DNA, 1738 bp, Homo Sapiens
gaattccgggggttccggcgctccgcggccccaagcgccctcctttcctccctccgccggccggggttgcgggcgcggggcgccgcgggccatgcgatctcggcgcggcccagcccggccggcggcgccccgcccccgctggagcctggggccccgctgcgccgaggccatgttcccggtgtttccttgcacgctgctggccccccccttccccgtgctgggcctggactcccggggggttggcggcctcatgaactccttcccgccacctcagggtcacgcccagaaccccctgcaggtcggggctgagctccagtcccgcttctttgcctcccagggctgcgcccagagtccattccaggccgcgccggcgcccccgcccacgccccaggccccggcggccgagcccctccaggtggacttgctcccggtgctcgccgccgcccaggagtccgccgcggctgctgcggccgctgccgccgctgctgccgccgtcgctgccgcgcccccggcccctgccgccgcctctacggtggacacagcggccctgaagcagcctccggcgccccctccgccacccccgccagtgtcggcgcccgcggccgaggccgcgccccccgcctccgccgccactatcgccgcggcggcggccaccgccgtcgtagccccaacctcgacggtcgccgtggccccggtcgcgtctgccttggagaagaagacaaagagcaaggggccctacatctgcgctctgtgcgccaaggagttcaagaacggctacaatctccggaggcacgaagccatccacacgggagccaaggccggccgggtcccctcgggtgctatgaagatgccgaccatggtgcccctgagcctcctgagcgtgccccagctgagcggagccggcgggggagggggagaggcgggtgccggcggcggcgctgcagtggccgccggtggcgtggtgaccacgaccgcctcggggaagcgcatccggaagaaccatgcctgcgagatgtgtggcaaggccttccgcgacgtctaccacctgaaccgacacaagctgtcgcactcggacgagaagccctaccagtgcccggtgtgccagcagcgcttcaagcgcaaggaccgcatgagctaccacgtgcgctcacatgacggcgctgtgcacaagccctacaactgctcccactgtggcaagagcttctcccggccggatcacctcaacagtcacgtcagacaagtgcactcaacagaacggcccttcaaatgtgagaaatgtgaggcagctttcgccacgaaggatcggctgcgggcgcacacagtacgacacgaggagaaagtgccatgtcacgtgtgtggcaagatgctgagctcggcttatatttcggaccacatgaaggtgcacagccagggtcctcaccatgtctgtgagctctgcaacaaaggtactggtgaggtttgtccaatggcggcggcagcggcagcagcggcagcagtagcagcccctcccacagctgtgggctccctctcgggggcggagggggtgcctgtgagctctcagccacttccctcccaaccctggtgagctccaagttggttgcgggggagaggggagaatggagtagagtcccttggtacaagctcctctcccccctcttttcccaccaactcctatttccctaccaaccaaggagcctccagaaggaaaggaggaagaaatgttttcttaggggaattc

SEQ ID NO: 57264 - DNA, 3198 bp, Homo Sapiens
agtcggcctgcgctcctcagcctggcggttctacctccgagggttcgcccgcccttggttttccttacaccttagcctttggctcctttgaccactcgaagccccacagcgtgttccagcggacttcaccagcagacccagaagtggtgggtgaaacactgcctctgttcctccttgagcctgtcgggagctgctgcctgccaccaccatgtctgctgcaaatcctgagactccaaactcaaccatctccagagaggccagcacccagtcttcatcagctgcagctagccaaggctgggtgttaccagaaggcaaaatcgtgccaaacactgtttttgttggtggaattgatgctaggatggatgaaactgagattggaagctgctttggtagatacggttcagtgaaagaagtgaagataatcacgaatcgaactggtgtgtccaaaggctatggatttgtttcgtttgttaatgacgtggatgtccagaagatagtaggatcacagatacatttccatggtaaaaagctgaagctgggccctgcaatcaggaaacaaaagttatgtgctcgtcatgtgcagccacgtcctttggtagttaatcctcctcctccaccacagtttcagaacgtctggcggaatccaaacactgaaacctacctgcagccccaaatcacgccgaatcctgtaactcagcacgttcaggcttattctgcttatccacattcaccaggtcaggtcatcactggatgtcagttgcttgtatataattatcaggaatatcctacttatcccgattcaccatttcaggtcaccactggatatcagttgcctgtatataattatcagccatttcctgcttatccaagttcaccatttcaggtcactgctggatatcagttgcctgtatataattatcaggcatttcctgcttatccaagttcaccatttcaggtcaccactggatatcagttgcctgtatataattatcaggcatttcctgcttatccaagttcaccatttcaggtcaccactggatatcagttgcctgtatataattatcaggcatttcctgcttatccaagttcaccatttcaggtcaccactggatatcagttgcctgtatataattatcaggcatttcctgcttatccaaattcagcagttcaggtcaccactggatatcagttccatgtatacaattaccagatgccaccgcagtgccctgttggggagcaaaggagaaatctgtggaccgaagcatacaaatggtggtatcttgtctgtttaatccagagaagagactgataaattccgttgttactcaagatgactgcttcaagggtaaaagagtgcatcgctttagaagaagtttggcagtatttaaatctgttggatcctctcagctatctagtttcatgggaagttgctggttttgaatattaagctaaaagttttccactattacagaaattctgaattttggtaaatcacactgaaactttctgtataacttgtattattagactctctagttttatcttaacactgaaactgttcttcattagatgtttatttagaacctggttctgtgtttaatatatagtttaaagtaacaaataatcgagactgaaagaatgttaagatttatctgcaaggatttttaaaaaattgaaacttgcattttaaagtgtttaaaagcaaattactgactttcaaaaaagtttttaaaacctgatttgaaagctaacaattttggatagtctgaacacaagcatttcacttctccaagaagtacctgtgaacagtacaatatttcagtattgagctttgcatttatgatttatctagaaatttacctcaaaagcagaatttttaaaactgcatttttaatcagtggaactcaatgtatagttagctttattgaagtcttatccaaacccagtaaaacagattctaagcaaacagtccaatcagtgagtcataatgtttattcaaagtattttatcttttatctagaatccacatatgtatgtccaatttgattgggatagtagttaggataactaaaattctgggcctaattttttaaagaatccaagacaaactaaactttactgggtatataaccttctcaatgagttaccattcttttttataaaaaaaattgttccttgaaatgctaaacttaatggctgtatgtgaaatttgcaaaatactggtattaaagaacgctgcagcttttttatgtcactcaaaggttaatcggagtatctgaaaggaattgtttttataaaaacattgaagtattagttacttgctataaatagatttttatttttgttttttagcctgttatatttccttctgtaaaataaaatatgtccagaagaggcatgttgtttctagattaggtagtgtcctcattttatattgtgaccacacagctagagcaccagagcccttttgctatactcacagtcttgttttcccagcctcttttactagtctttcaggaggtttgctcttagaactggtgatgtaaagaatggaagtagctgtatgagcagttcaaaggccaagccgtggaatggtagcaatgggatataatacctttctaagggaaacatttgtatcagtatcatttgatctgccatggacatgtgtttaaagtggctttctggcccttctttcaatggcttcttccctaaaacgtggagactctaagttaatgtcgttactatgggccatattactaatgcccactggggtctatgatttctcaaaattttcattcggaatccgaaggatacagtctttaaactttagaattcccaagaaggctttattacacctcagaaattgaaagcaccatgactttgtccattaaaaaattatccatagtttttttagtgcttttaacattccgacatacatcattctgtgattaaatctccagatttctgtaaatgatacctacattctaaagagttaattctaattattccgatatgaccttaaggaaaagtaaaggaataaatttttgtctttgttgaagtatttaatagagtaaggtaaagaagatattaagtccctttcaaaatggaaaattaattctaaactgagaaaaatgttcctactacctattgctgatactgtctttgcataaatgaataaaaataaactttttttcttca

SEQ ID NO: 57265 - DNA, 1983 bp, Homo Sapiens
ggagtcggcggctcagttgtccatgaccctgaaggtccaggagtacccgaccctcaaggtgccctacgagacgctgaacaaacgctttcgcgccgctcagaagaacattgaccgggagaccagccacgtcaccatggtggtggccgagctggagaggacgttgagcggctgccccgccgtggactccgtggtcagcctgctggacggcgtggtggagaagctcagcgtcctcaagaggaaggcggtggaatccatccaggccgaggacgagagcgccaagctgtgcaagctccggatcgagcacctcaaagagcatagcagcgaccagcccgcggcggccagcgtgtggaagaggaagcgcatggatcgcatgatggtggagcacctgctgcgttgcggctactacaacacggctgtcaagctggcgcgccagagcggcatcgagagctgcctggagttcagcctcagaatccaggagttcattgaactcatccggcagaataagagactggacgctgtgagacatgcaagaaagcacttcagccaagcagaagggagccagctggacgaggtgcgccaggccatgggcatgctggccttcccgcccgacacgcacatctccgtacaaggaccttctggaccctgcacggtggcggacctgcacggtggcggatctgatccagcagttccggtacgacaactaccgactacaccagctgggaaacaattctgtgttcaccctcaccctgcaggccggcctctcagccatcaagacaccacagtgctacaaggaggacggcagctccaagagccctgtctgccctgtgtgcagccgctccctgaacaagctggcgcacgcctgcccatggcccactgtgccaactcccgcctggtctgcaagatttctggcgacgtgatgaacgagaacaatccgcccatgatgctgcccaacggctacgtctacggctacaattctctgctttctatccgtcaagatgataaagtcgtgtgcccgagaaccaaagaagtcttccacttctcacaagccgagaaggtgtacatcatgtatgccccacgtcgtgaagcgcaccctcggggacgggctgcagtgggcggggaggcacgcttcctcctgtcccacgctccagcctgccgcggcgtttctgtttcttgcgaccaaagatccgtgagcaacgataaatactcttaggaagagagaaaataaggtttcataagtttgtacttgaaaacatttggattggtaggattttgtaacacgtcaaccatttgatgcttctgaaaagtactttcaacttgcgaaggaaactcttctttaaagactgacctaaacaccgagggaaacttaagaacgtttaaaatataggagtccgtgatttccctgtgttttcagtttctttccttctgtgaacgatgagacttggagaacgggctggtccttcaccacttcctgttggccctggctggccgggaaggtggcagcggcaccggagggacacttatggcttcattcgagagctgctgccaaaacgcctgcgcgccaccgtcgggggctggcttcgaggacgccgcctgctcgcgggtcgtgtccgcgggactgtgttcgtacgtgcatagtttcgatatcacatcgcggggctgtgttcggagtctgcgtcgtttcgtatacacaccctctgtgtgcgccttacttcctgcttcgagaatgtataacgtggaaatccacgggaccaaatttctgcagaggccttgccggatggttccataactgtagagtctaattgctatccattacagaaattaatcgttcagttgaaagaagtactgatgacttttcaaaacaaatgaaccaccgtagctgacagagaaccgtatcgtaagaggtttgtagttagtgcttatttttgcatgttgatgttgactagctaataaactgtaaatgtaaaaaaaaaaaaaaaaaaaaaa

SEQ ID NO: 57266 - DNA, 1552 bp, Homo Sapiens
cctcttgcggccacaggcgcggcgtcctcggcggcgggcggcagctagcgggagccgggacgccggtgcagccgcagcgcgcggaggaacccgggtgtgccgggagctgggcggccacgtccggacgggaccgagacccctcgtagcgcattgcggcgacctcgccttccccggccgcgagcgcgccgctgcttgaaaagccgcggaacccaaggacttttctccggtccgagctcggggcgccccgcaggcgcacggtacccgtgctgcagtcgggcacgccgcggcgccgggggcctccgcagggcgatggagccggtctgcaaggaaagtgaggcgccgccgctgcgttctggaggaggggggcacaaggtctggagaccccgggtggcggacgggagccctccccccgccccgcctccggggcaccagctccggctccattgttcccgcccgggctggaggcgccgagcaccgagcgccgccgggagtcgagcgccggccgcggagctcttgcgaccccgccaggacccgaacagagcccgggggcggcgggccggagccggggacgcgggcacacgcccgctcgcacaagccacggcggactctcccgaggcggaacctccacgccgagcgagggtcagtttgaaaaggaggatcgagctcactgtggagtatccatggagatgtggagccttgtcaccaacctctaactgcagaactgggatgtggagctggaagtgcctcctcttctgggctgtgctggtcacagccacactctgcaccgctaggccgtccccgaccttgcctgaacaagcccagccctggggagcccctgtggaagtggagtccttcctggtccaccccggtgacctgctgcagcttcgctgtcggctgcgggacgatgtgcagagcatcaactggctgcgggacggggtgcagctggcggaaagcaaccgcacccgcatcacaggggaggaggtggaggtgcaggactccgtgcccgcagactccggcctctatgcttgcgtaaccagcagcccctcgggcagtgacaccacctacttctccgtcaatgtttcagcttgcccagatctccaggaggctaagtggtgctcggccagcttccactccatcactcccttgccatttggacttggtactcggcttagtgattagaggccctgaacaggtggtggtatccctgctctgctggagaggaacccagatgctctcccctcctcggaggatgatgatgatgatgatgactcctcttcagaggagaaagaaacagataacaccaaaccaaaccccgtagctccatattggacatccccagaaaagatggaaaagaaattgcatgcagtgccggctgccaagacagtgaagttcaaatgcccttccagtgggaccccaaaccccacactgcgctggttgaaaaatggcaaagaattcaaacctgaccacagaattggaggctacaaggtccgttatgccacctggagcatcataatggactctgtggtgccctctgacaagggcaactacacct

SEQ ID NO: 57267 - DNA, 7193 bp, Homo Sapiens; identical to SEQ ID NO: 29006

SEQ ID NO: 57268 - DNA, 3098 bp, Homo Sapiens
cacggaacagccctcctggggtccccacgagccgcgtcctgctgtgccccggcgcctacgcagcagcggccgcggccgcggtgggcacgcacggttaccccgggcagctccggccgccagctgcagccccgtcgcctcggccgcgccagccggctgcgggcacctgggggcgggctgggggcgccggccgcggcaggaggcgctgtagcgagggctgcggcgccggtcctgcggcggccgcgggaggcagcggggcaggcgctgtgggccgggctcctcctccggctcctgcgcgaccgcctcccgccgggctctgccggcgcccgccgtccccgcagcgccgctctgcgcccgccgccccgagcgcccgcgcggggctggcgggagcctcggcgggcgcgcgggcgcgcggggccatggtcgtggccccctgacgggccgcggccgcctccatgaagcggaaaagcgagcggcggtcgagctgggccgccgcgcccccctgctcgcggcgctgctcgtcgacctcgccgggtgtgaagaagatccgcagctccacgcagcaagacccgcgccgccgggacccccaggacgacgtgtacctggacatcaccgatcgcctttgttttgccattctctacagcagaccaaagagtgcatcaaatgtacattatttcagcatagataatgaacttgaatatgagaacttctacgcagattttggaccactcaatctggcaatggtttacagatattgttgcaagatcaataagaaattaaagtccattacaatgttaaggaagaaaattgttcattttactggctctgatcagagaaaacaagcaaatgctgccttccttgttggatgctacatggttatatatttggggagaaccccagaagaagcatatagaatattaatctttggagagacatcctatattcctttcagagatgctgcctatggaagttgcaatttctacattacacttcttgactgttttcatgcagtaaagaaggcaatgcagtatggcttccttaatttcaactcatttaaccttgatgaatatgaacactatgaaaaagcagaaaatggagatttaaattggataataccagaccgatttattgccttctgtggacctcattcaagagccagacttgaaagtggttaccaccaacattctcctgagacttatattcaatattttaagaatcacaatgttactaccattattcgtctgaataaaaggatgtatgatgccaaacgctttacggatgctggcttcgatcaccatgatcttttctttgcggatggcagcacccctactgatgccattgtcaaagaattcctagatatctgtgaaaatgctgagggtgccattgcagtacattgcaaagctggccttggtcgcacgggcactctgatagcctgctacatcatgaagcattacaggatgacagcagccgagaccattgcgtgggtcaggatctgcagacctggctcggtgattgggcctcagcagcagtttttggtgatgaagcaaaccaacctctggctggaaggggactattttcgtcagaagttaaaggggcaggagaatggacaacacagagcagccttctccaaacttctctctggcgttgatgacatttccataaatggggtcgagaatcaagatcagcaagaacccgaaccgtacagtgatgatgacgaaatcaatggagtgacacaaggtgatagacttcgggccttgaaaagcagaagacaatccaaaacaaacgctattcctctcactctctccatttcaaggactaaaacagtcttgcgttaagtaaaaacctgtgaccagagctgaaggaagactctaggactgaaaactgcaacagaaattagcacaatttgaaaacaaaacaaaattgcaaaagccttagttgctttttccacctaagaagttgatcaatggagaaaatgtccactggagtttgaataatgaactttgagtttgggtgcaagcaaatgactcagagaagggtccagctctcaagctgaatgacaaacatgctgttgtaaatttagtctcaggtgtaaatacccaagccctctggtacccagggagctggctggtctgtggtgcatgtgtgtccctgtgatggcaatcattgtagttgctggccttcagaagaattgaggatctgatggaggttttttatgtatttattttctgttcaccttgtgaccctgtgtcaaaatttataaagatacaaaaggcattactgaaatggtactttctgtaatttgatactatttggcttaatcatcttcacttgactatttgtaatactgttgtaatgttaactctgttaagtacccaagctgcttgtcttccaccaaagagtgctttattaacaagaatctgtgaaaatcacatttaaacactgttgcatgttgtaagaccaggtggtaccttagtaacctaaaacttgcaagagaatattaatggtagctttagaagactcaggaggagaaactgacttcagagttggaagatgttgcaagtcgttcctttttctgtccttcagggactgaagaactgggaggctgcccattgtttggttgccagtcatacaaattaaaatcatatttccttccatgaatggaagaaacacactattggtttttccccttggaaacagcaatcccaaataatgtcggcttacaaaaaaaaaaagttaccacttttttagagtccttccctgtaacattggattttttttttcccttatgagatccacctaaggccattgacgtggcctgcgatctcagtgacaatgatctgcttctggatctcactgttgcctttggttagggaacacagagtgcttctcccgcagccctactggaacacagcagagtctgtgccatgaagcagttacagaaacagaattgatgtgctgctaaaaaaaaaaaaaaaaatggggcccgggggggcgtccgccggccctgcgggccgccggtgaaataccactactctgatcgttttttcactgacccggtgaggcgggggggcgagccccgaggggctctcgcttctggcgcg

SEQ ID NO: 57269 - DNA, 5646 bp, Homo Sapiens
agaagaggaagattagaagatttttttttttctttgagagaaagcccagcggagataaacgaatgtcccctcatctccaaagaaaagttcatcggatttttattctagagagctcatcttcaggatgtcagtgaacatttctactgcaggaaaaggtgtggatccaaatacagttgatacttatgacagtggcgatgattgggaaatcggggttggaaatttaataattgatttggacgctgatttggagaaggacagacagaaatttgagatgaataattccaccaccaccactagtagcagcaactccaaggattgtggaggtccggcctccagtggggctggtgctaccgcagccttagctgatggcctaaaatttgcttctgttcaggcctctgctccccaggggaattcacacaaagagaccagcaaatcaaaagtgaaaaggagtaaaacttctaaggatgctaataaatctctgccttctgctgccttgtatgggattcccgagatcagcagcactggcaagaggcaggaagtccaagggcgccctggagaggcaactggcatgaattcagcgctgggtcaaagtgtgagcagcggcggcagcggcaacccaaacagcaatagtaccagcaccagcacctctgccgccaccgcgggggcaggctcctgtgggaaaagcaaagaggagaagccaggtaaaagccagagcagccgaggcgccaagcgggataaggatgcggggaaatccaggaaggacaagcacgacctgcttcagggccaccagaatggcagtggcagccaggccccttccggggggcacctctatggctttggggccaagagcaatggaggtggcgcgagccccttccactgcgggggcactgggagtggcagcgtcgccgctgcaggggaagttagcaaaagtgccccggattcagggctcatgggaaactctatgttggtaaagaaggaagaggaggaggaggagagccacaggcgaatcaagaaactgaaaactgagaaggttgaccccctgtttacagtgccagcgccaccaccgccgatttccagcagtctcacgcctcagattctaccctcctacttttccccatcttcatccaatattgcagcaccggttgaacagcttttggttcggactcgttctgtgggtgtcaatacatgtgaagttggagtagtgacagagccagagtgtcttgggccctgtgaacctgggaccagtgtgaatttggaagggatcgtgtggcatgaaacagaagaaggtgtcctagtggtcaatgtcacgtggaggaacaaaacgtacgtgggaaccctactggactgcaccaagcacgactgggcccctcccaggttttgtgagtcaccgacaagtgacctggagatgagagggggccggggcagagggaagagagcaaggtctgctgctgctgccccgggctccgaggccagcttcacagagtccagagggctgcagaataagaacagagggggggccaatgggaaagggaggcggggcagcctcaatgccagcggacgaaggacacccccaaattgtgctgctgaggatatcaaagccagcccttcctccaccaacaaaaggaaaaacaagcctccaatggagctggacctgaactccagctctgaggacaataagcctggaaagcgtgtccgcacaaattccagaagcactcccactacccctcaagggaaaccagagactacttttttggaccaaggctgctcttctccagtgttaatcgactgtccccacccaaactgcaacaaaaagtacaagcacattaacggcctgaggtaccaccaggctcatgcacacttagacccagaaaacaagctggagttcgagcctgacagtgaggacaagatctcggactgtgaggaaggattgagtaatgtggcacttgaatgcagtgagccaagcacaagtgtatctgcttatgaccagttgaaggcaccggcatcccctggtgctggaaacccacctgggaccccaaagggaaagagagagctgatgagcaatggcccaggttccattattggtgctaaagctgggaagaattctggcaaaaagaagggccttaacaatgaactgaacaaccttccagtaatctccaacatgacggctgcgttagacagttgctcggcagcagacggcagtttggctgctgagatgcctaaactggaagcagaaggattaattgacaagaaaaatttaggagataaagaaaagggcaaaaaagctaacaactgcaaaacggacaaaaacctctctaaactgaaaagtgcccggcccattgcccctgccccagcccccactcccccgcagctaatcgctatacccactgcaacctttacaacgaccaccactgggacaatacccggactgccctccctcacaacaactgttgttcaggctacaccaaagagtcctccgttaaaacccattcaaccaaagcccacaattatgggagagcccatcaccgtgaacccagctctggtgtcactcaaagacaaaaagaaaaaggagaagcgaaagctaaaggacaaagaagggaaagagacgggaagcccaaaaatggatgccaagctggggaaactagaggactccaagggggccagcaaagatttacctgggcattttttaaaggatcatctcaacaagaatgaagggctggcaaatggactgtcggagtctcaggagagccgcatggccagtatcaaagctgaggccgataaggtttacactttcacagacaacgctcccagcccttccatagggagcgcctcgaggctggaatgcagcactttggtgaacgggcaggcaccaatggcacctctgcatgtgttgacccagaatggggcagagagttcagctgcaaagacaagcagcccggcctattcagacatatctgatgctgctgacgatggtggttctgacagcaggtcggagggtatgagatcaaaggccagttccccatcagatattatttctagtaaggacagtgttgtaaaagggcattcttcaactacagcacaatcatctcaactgaaagagtcccattctccctattaccacagctatgatccttattattctccaagttacatgcaccctgggcaggtcggtgcccctgcagctggaaatagtgggagcacgcagggaatgaagatcaagaaggagtctgaggaagatgctgaaaagaaagacaaggcagagcagttagattctaagaaagtggaccacaattctgcatccttacagcctcagcaccagtcggtgatcacacaaagacatcctgccctggctcagtcactttattatggccagtatgcatatgggctctatatggaccagaagtctctgatggccaccagccctgcctatagacagcagtatgagaagtactatgaggaccagaggctggcagagcagaaaatggcccagactgggagaggagactgtgaaaggaaaagtgagctccccttgaaagagctgggcaaggaggaaactaaacagaaaaatatgccatcggccacaatctcaaaagctccctctactccggagcctaacaaaaaccattctaaactagggccatcagtgcctaataaaactgaggagacaggtaaatcgcagcttctctccaatcaccagcagcagcttcaggccgacagcttcaaagctaagcagatggaaaaccaccagcttattaaggaggctgtagaaatgaagtctgtcatggactctatgaagcagacaggtgtagacccaacctcgagatttaaacaagacccagattcaagaacatggcatcattatgtataccagcccaaatatctggatcagcaaaagtcagaagaacttgatagagagaagaaattaaaagaggatagtccgaggaaaactcctaataaagagagtggtgtgcccagccttcctgtatcgttaacaagcattaaagaggagcccaaagaggccaagcatcctgattctcaatcaatggaggagagcaagctgaaaaatgatgatcgaaagactcctgtgaactggaaggactctcggggaacaagagtggctgtctcctcacccatgagtcagcatcagtcatacatacagtacttgcatgcttatccttacccacagatgtacgaccccagccatcctgcataccgggctgtttctcccgtcctaatgcacagttatcctggggcatatctctctccaggatttcattatcctgtttatgggaagatgtcagggagagaagagacagagaaagtcaataccagccctagcgtcaacacgaaaacaaccactgaatctaaagcactggatttgctccagcagcatgctaaccaataccgcagcaagtctcctgctcctgtggaaaaggctacagctgagcgggaacgggaggcagaaagggaaagggatcgccactcccccttcggccagcggcacctgcacacgcaccaccacacccacgttggcatgggttacccgctaatcccgggtcaatatgacccttttcaaggcttgacctctgctgcccttgttgcctctcagcaggtggctgcccaggcatctgcatctggaatgtttcctggacaaagaagagaataacaagattggacatgtacattgtcatgtgactggatcacatggggaagcgctttatacagacatcagttccatggtgttaatttgaaatgccttaatggcaggcaaaaaccagtcatttcatttttgtaaattacagattttatcacagagtaacaaatgttgctgtaattaaacttctgttttatatatatatacgtatacatatctgtatatatacatatatatatatataaatataaatatattctttactttttgtatcagtaaccaggctcgcacacacagggtctgctgccacgtcgcaaaccactcagtaaaggaaattaaaaatgtatttgtcatgttaaaaagtgttagccacaaaaggctacttactttcttttccttttcctttaaaattgtaaataaataatgttatgtatcagtgtgcctgaaccttgcatatccttcacatatttcccataagcccctcagaaaggctaactgtgatgatgacactttggtacaatttagatgtctatttggtggctcctgttaaagacgcaccagtgtaaaatgttcctgtagtcactgtttgtacttgtgtattgtggaaaaagtacttttggaaggcatggggttgccagtaccacaaaaactgtgttgtatataatgtaaagattaaaatggggaaataatgagcatctgtgaataatgaggtgtcattttttgataatcttgaatggcaaataacccaatagcctgcgtaccagagacatctgtgattgttctattacttgaatagttctacagtctttttttttttttaatgtttacaattatccagttttagaagagagagactttaacgccattgcctggttacttgttttatgctgtaatctagtttattttatgtaaaatgtatattgaatgctttccttttttatacctgccttaaataatttggcaatcagaattaaaaagtttttttttttttaaat

SEQ ID NO: 57270 - DNA, 2362 bp, Homo Sapiens
actcagcccagtggccctctgagctgttccttcttgaccggcacacacagctcgcttcttcactttcttttccatccactgccggacccaagccagccttccagggagcagccatgccttacctctaccgggccccagggcctcaggcacacccggttcccaaggacgcccggatcacccactcctcaggccagagctttgagcaaatgaggcaggagtgcctgcagagaggcaccctgtttgaggatgcagacttcccagccagcaattcctccctgttctacagtgagaggccgcagatcccctttgtgtggaaacgaccaggggaaatcgtgaaaaacccagaattcattcttggaggggccaccaggactgatatctgccagggagagctgggagactgctggctattagccgccatcgcctcccttacgcttaatcaaaaagcactggccagagtcatcccccaggaccaaagctttggccctggttatgccgggatattccatttccagttctggcagcacagtgagtggctggacgtggtgatcgatgaccgcctgcccaccttcagggaccgcttggttttcctccactctgccgaccacaacgagttctggagcgccttgctggaaaaagcctacgccaagctaaatgggagctatgaagctctgaagggaggcagcgccatcgaggccatggaagacttcactgggggtgtggcagagaccttccaaactaaagaggcccccgagaacttctatgagattctagagaaggctttgaagagaggctccctgctgggctgcttcattgataccagaagtgctgcagaatctgaggcccggacgccgtttggtcttattaagggtcatgcctacagtgtaacgggaattgaccaggtaagcttccgaggccagagaatcgagctcatccgaatccggaacccttggggccaggttgagtggaacgggtcgtggagcgacagttctccggagtggcgttctgttggtccagctgagcagaagcgtctgtgtcacactgctctggatgatggggaattctggatggcatttaaggacttcaaggcccactttgataaagtggagatctgcaacctcactcccgatgccctggaggaagacgcgatccacaaatgggaggtgacggtccatcagggaagctgggttcgcggctccacggctgggggctgccgcaatttcctggataccttttggaccaatccacaaataaaattgtctctgactgagaaagatgaggggcaggaggagtgtagtttccttgtagccctgatgcagaaagatagaaggaaactcaagagatttggtgccaatgtgctgacaatcggctatgccatttatgagtgccctgacaaagacgaacacctgaacaaagacttcttcagataccacgcttctcgggccagaagcaagacgttcatcaacctgagagaagtctccgaccggttcaagctgccccctggggagtacatcctgattcccagcacttttgagccccaccaggaagctgatttctgtctgagaatcttttcagagaaaaaagccattacccgggatatggatggaaatgtagacattgaccttcctgagcctccaaagccaactccacctgaccaggagacagaggaggagcagcggtttcgggctctgtttgaacaagtcgctggtgaggacatggaggtgacagcagaggaacttgagtatgttttaaatgctgtgctgcaaaagaaaaaggacatcaaattcaagaagctaagcctgatctcctgtaaaaacatcatttccctgatggacaccagcggcaatgggaagctggagtttgatgaattcaaagtgttctgggacaagctgaagcagtggattaaccttttccttcggtttgatgctgacaagtccggcaccatgtctacctatgaactacggactgcactgaaagctgcaggctttcagctgagcagccacctcctgcagctgattgtgctcaggtatgcggatgaggagctccagctggacttcgatgacttcctcaactgcctggtccggctggagaatgcgagccgggtgttccaggctctcagtacaaagaacaaggagttcattcatctcaatataaatgagttcatccatttgacaatgaacatctgaggctgccttgtagagatgcagcctgcccagctgaatcttggcttctggaccttgaccttcagaacttctcttggtgtggaaccattacgcccagggttcactcccctctcatcgtccggccttctcccttcatcttgatctgggaagaatgaaatgaactcagctacactctctga

SEQ ID NO: 57271 - DNA, 4064 bp, Homo Sapiens; identical to SEQ ID NO: 30830

SEQ ID NO: 57272 - DNA, 15534 bp, Homo Sapiens
ccagccgtgtgtgatgagtggccacaccttgcctcctcttcccgtcccaggcaccaacagcacagagcaggccagtgtacccagagccatggcagccacgctgggagccggcacgccccccaggccccaggccaggagcatagctggggtgtatgtggaggcctcgggccaggcccagagtgtctacgccgccatggagcagggcctcctgcctgctgggctcgggcaggctctgctagaggcccaggcagccactgggggcctggtggacctcgcccggggccagctgctccctgtgtccaaggccctgcagcagggtctggtggggctggagctgaaggagaagctgctggccgctgagcgtgccactacgggctatcctgacccctacggcggtgagaagctggccctctttcaggccatcgggaaggaggttgtggacagggccctggggcagagctggctggaggtccaactggccactgggggcctggtggaccccgcccagggagtgctcgtggcccctgagccagcctgccaccagggcctcctggaccgggagacatggcacaagctgtcagagcttgagcctggcacaggtgacctgcgcttcctcaaccccaacacgctggagcggctgacataccaccagctgctggaaaggtgtgtgcgtgcccccgggtcggggctagccttgctgcccctcaagatcaccttccgctccatgggcggggcggtgagtgcagctgagctgctggaggtgggcatcctggacgagcaggctgtgcagggtctgcgggagggcaggctggccgcagtggacgtgagtgcacgtgccgaggtgcggcgctacctggagggtaccggcagcgtggccggggttgtcctgctgcccgaaggccacaagaagagctttttccaggctgccaccgagcacctgctcccaatgggcaccgcgctgccactcctagaggcccaggctgccacccacaccctggtggaccccatcacaggccagcggctgtgggtagacgaggcagtcagggcgggcctggtcagcccagagctccatgagcagctcctggtggctgagcaggccgtgacagggcaccacgaccccttcagtggctcccaaatcccccttttccaggccatgaagaaggggctagtggacaggccactagcactgcggctcttggatgcccagctggccacaggcgggctggtctgtccagcacgcaggctccggctgcccctggaggccgccctgcgctgcggctgcctggatgaagacactcagcggcagctctcgcaggctggcagcttctcagacggcacgcacggcggcctgcgctatgaacagctgctggccctctgtgtcaccgacccagagaccgggcttgccttcctgccactctcagggggaccccggggaggggagccccagggacccccattcatcaagtacagcactcggcaggccctgagcacggccacagccaccgtctctgtggggaagttccggggccggcccgtgtccctctgggagctgctcttctctgaggccatctcctcagagcagagggcgatgctggcccagcagtaccaggaagggaccctctccgtggagaagctggccgctgagctgagcgccacccttgagcaggctgcagccactgccagggtcaccttttctgggctgagggacaccgtgacaccaggagagctgctgaaagccgagatcatcgaccaggacctgtacgagcggttggagcatggacaggccacagccaaggatgtgggcagcctggcctcggcgcagaggtacctgcagggtacgggctgcattgctggcctgctgctccctggctcccaggaacgcctgagcatctatgaggcccgatgcaaggggctcctccggcccggcactgccctcatccttctggaggcacaagctgccacaggcttcatcatcgacccaaaagcaaacaaggggcactccgttgaggaggcactgagggctgctgtcattgggcctgatgtgttcgcgaagctgctgtcggctgagcgcgctgtcactggctacactgacccctacaccgggcagcagatctccctcttccaggccatgcagaagggcctcatcgtccgggagcacggcatccgcctgctggaggcccagatcgccacgggcggcgtcatcgaccccgtgcacagccaccgcgtgcccgtggacgtggcctaccggcgcggctacttcgatcagatgctgaacttgatcctgttggacccttctgacgacaccaagggcttcttcgaccccaacacgcacgagaacctcacgtacctgcagcttctggagcgctgtgtgcgtgaccccgagacgggcctgtacctcctgccactcagcagcacgcagtccccgctggtggacagtgccacccagcaggccttccagaacctgctgctctccgtgaagtatggacggtttcaggggcagagggtctccgcgtgggagctgatcaactctgagtacttcagcgagggccgcaggaggcagctgctgcgtcgctaccggcagcgcgaggtcacgctggggcaggtggcaaagctgctggaggcggagacgcagagacaggcggacatcatgctgcccgcactgcggagccgggtcaccgtccaccagctcctggaggccggtatcattgaccagcagctgttggaccaagtgctggccgggacaatcagcccggaggccctcctactcatggacggcgtccgcaggtacctgtgcggcctgggagctgtgggcggtgtgcggctgctgccctctggccagcggctcagcctctaccaggccatgaggcagaagctgctggggcccagggtggccctggccctgctggaggcccaggcggccaccggaaccatcatggaccctcacagcccagagagcctctcggtggatgaggccgtgcgcaggggtgtggtggggccggagctgtatggcaggctgaagcgggctgagggtgccattgctggcttcagagaccccttctctgggaagcaggtgtctgtgttccaggccatgaagaaaggtctcatcccttgggagcaagctgcccgcctcctggaggctcaagtggccacaggagggatcattgaccccaccagccaccaccacctccccatgccagtggccattcagcgtggctatgttgaccaggagatggagacagccttgtccagctcctccgagaccttccccacaccggacggccaggggcgcacgagctatgcccagctcctggaggagtgccccagggatgagacttctggccttcacctcctgcccctgccagaaagtgctcctgccctccccaccgaggagcaggtccagaggagcctgcaggccgtgccgggggccaaggatggcacatccctctgggacctgctcagctcctgccacttcaccgaggagcaacggaggggcctgctggaggacgtgcaggaggggaggaccactgtgccacagctgctagcctctgtgcagaggtgggtacaggagaccaagcttctggcccaggcccgcgtcatggtgcccggcccacggggtgaggtacccgctgtctggctgctggatgctggcatcatcacccaggagacccttgaggccctggctcagggcacgcagtcgcccgcccaggtcgccgagcagccggcggtgaaggcctgcctgtggggcacaggctgcgtggccggtgtgctgctacagccctctggggccaaggccagcatcgcccaggccgtgagggatggcctcctgcccacaggcctgggccagaggctgctggaagcccaggtggcatctggcttccttgttgaccccctgaacaaccagagactgtcagtggaggacgcggttaaggtcggcctggtgggcagggagctgagtgagcagctcgggcaggccgagagggcggcggccgggtacccagatccctactctagggcctccctctctctgtggcaggccatggagaaggggctcgtgccacagaacgagggcttgcccctcctgcaggtgcagctggccacagggggtgtggtggaccctgtccacggggtgcacctgccccaggcggcagcctgcagactcggccttctggacacacagacgagccaggtgctgactgcagttgacaaggacaacaagttcttctttgaccccagtgcgcgggaccaggtgacctaccagcagctcagggagcgctgcgtgtgcgactccgagaccggattgttgctgttgccactgccttcagacacagtgcttgaggtggacgaccacaccgcggtggctctgagggccatgaaggtgcccgtcagcacagggaggtttaaggggtgtagcgtgtcactctgggacctgctgctctccgaatacgttggcgctgacaagcggcgggagctggtggcactctgtcggtctgggagggctgcggccctgcggcaggtggtcagcgcagtcaccgccctggtcgaggctgcagagaggcagcccctgcaggccaccttcagagggctccggaagcaggtgtcagccagggacctgttcagggcgcagctgatcagcaggaagacgctggacgagctgagccaggggacaacgactgtgaaggaggtggcggagatggacagcgtgaagcggtccctggagggaggcaacttcattgccggggtccttatccagggcacccaggagaggatgagcatcccagaggccctgaggaggcacatcctgcggcctggcacagccctggtgctgctggaggcacaggcagctaccggcttcatcatcgaccccgcggagaaccggaagctgaccgtggaggaggcgttcaaagcaggaatgttcgggaaagaaacctacgtgaagctgctgtcggccgagcgcgccgtcaccggctacaccgacccctataccgggcagcagatctccctcttccaggccatgcagaaggacctcatcgtccgggagcacggcatccgcctgctggaggcccagatcgccacgggcggcatcatcgaccccgtgcacagccaccgcgtgcccgtggacgtggcctaccgctgcggctacttcgacgaggagatgaaccgcatcctggcggaccccagcgacgacaccaagggcttcttcgaccccaacacgcacgagaacctcacgtacctgcagcttctggagcgctgtgtggaggaccccgagacgggcctgtacctgctacaaatcataaagaaaggagaaaactacgtgtacatcaatgaggccacgagacacgtgttgcaatccagaactgcaaaaatgcgcgtggggaggtttgctgaccaggtggtctctttctgggacctgctgtcctctccatacttcacagaggacaggaagcgggagctcatccaggagtatggagcccagagtgggggcctggagaaattgctggaaatcatcaccacgacaattgaagaaacagagacgcaaaaccaaggcatcaaagtggcggccatcagaggggaggtgacagctgcagacctgttcaactccagggtcatcgatcagaagaccctgcacacacttcgtgtggggaggactgggggacaggcactcagcacgctggagtgtgtgaagccctatctggaaggcagcgactgcattgcgggggtcacggtgccctccaccagggaggtcatgagcctccatgaggccagcaggaaggagctcatccctgcagcatttgcgacttggctgctggaggcgcaggccgccaccgggttcctcctggacccctgcacccgccagaagctctctgtggatgaggctgtggatgtgggcctggtgaacgaggagctgcgggagaggctcctgaaggctgaaagagctgccacgggctacagggatccggccacaggagacacgatcccgctgttccaggccatgcagaagcagctcatcgagaaggcggaggcactgaggctgctggaggtgcaggtggccacggggggtgtcatcgacccacagcaccaccaccggctcccactggaaacagcctacagacggggctgtctgcacaaggacatctatgcgctcatttccgaccagaagcacatgaggaaacggtttgtggacccgaacacgcaagagaaggtctcgtaccgagagctgcaggagaggtgccgcccacaagaggacacgggctgggtgctgttcccagtgaacaaggctgcacgggactccgagcacatcgatgacgagacgagaagggccctggaggcagagcaagtggaaatcacagtgggaaggttcagaggccagaaaccaacactgtgggcactactgaattccgaatacgtgacagaggagaagaagctccagctggtgaggatgtatagaacacacaccagacgggcactgcagacggtagcgcagctcatcttagagttgatcgagaagcaggaaaccagcaacaaacacctgtggttccaaggaattagacgacagatcacagcttctgaactcctcagctcagccataatcacggaggaaatgctccaggacctggaaacgggacggagcacgacgcaagagctcatggaggacgaccgcgtcaagcgctacctggagggcaccagctgcatcgcgggcgtcctggtgcccgccaaggaccagcccggccgccaggagaagatgagcatctaccaggccatgtggaagggcgtgctgcggcccggcacggccctggtgctgctggaggcgcaggcggccaccggcttcgtcatcgaccccgtgcgcaacctgaggctgtcggtggaggagcccgtgcccgcgggcgtggtgggcagcgagatccaggagaagctgctgtcggccgagcgcgccgtcaccggctacaccgacccctacaccgggcagcagatctccctcttccaggccatgcagaaggacctcatcgtccgggagcacggcatccgcctgctggaggcccagatcgccacgggcggcgtcatcgaccccgtgcacagccaccgcgtgcccgtggacgtggcctaccggcgcggctacttcgacgaggagatgaaccgtgtcctggccgaccccagcgacgacaccaagggtttcttcgaccccaacacgcacgagaacctcacgtacgtgcagctgctgcgccgctgcgtgcccgacccggacaccgggctctacatgctgcagctggcaggccggggctccgccgtgcaccagctgagcgaggagctgcgctgtgccctgcgcgacgcccgcgtgacgccaggctcgggcgccctccagggccagagcgtctccgtctgggagctcctcttctaccgcgaggtgtccgaggaccggcgccaggacctgctgagcagataccgggcgggcacgctgaccgtggaggagctgggcgccaccctcacctcgctgctggcccaggcccaggcccaggcccgggccgaggccgaggccgggagcccgcgcccagacccccgggaggccctgcgtgcggccaccatggaggtcaaggtgggccgcctccgggggcgcgcggtgcccgtgtgggacgtgctggcgtccggctacgtgagcagggccgcccgggaggagctgctggccgagtttggctcggggaccctggacttgcccgcgctgacccgccggctgaccgccatcatcgaggaggccgaggaagcccccggggcccggccgcagctccaggacgccaggcgcggcccgcgggagccagggccagccgggcgaggggacggcgactcggggcgctcccagcgagagggccagggggagggcgagacccaggaggccgccgccgccgccgccgccgcccgccgccaggagcagaccctgcgtgatgccaccatggaggtgcagcgcgggcagttccaggggcggccggtctccgtgtgggacgtcctcttctcctcgtacctgagcgaggcccgccgagacgagctcctggcccagcacgcggccggcgccctgggcctgcccgacctcgtcgccgtcctcacccgggtcatcgaggagacggaggagcggctcagcaaggtgtccttccgcggcctgaggcgccaggtgtccgcctccgagctgcacacgtccgggatcctgggccccgagaccctgcgggacctggcccagggcactaagacgctgcaggaggtgacggagatggactcggtcaagcgctacctggagggcaccagctgcatcgcgggcgtcctggtgcccgccaaggaccagcccggccgccaggagaagatgagcatctaccaggccatgtggaagggcgtgctgcggcccggcacggccctggtgctgctggaggcgcaggcggccaccggcttcgtcatcgaccccgtgcgcaacctgaggctgtcggtggaggaggccgtggccgcgggcgtggtgggcggcgagatccaggagaagctgctgtcggccgagcgcgccgtcaccggctacaccgacccctacaccgggcagcagatctccctcttccaggccatgcagaaggacctcatcgtccgggagcacggcatccgcctgctggaggcccagatcgccacgggcggcgtcatcgaccccgtgcacagccaccgcgtgcccgtggacgtggcctaccggcgcggctacttcgacgaggagatgaaccgtgtcctggccgaccccagcgacgacaccaagggtttcttcgaccccaacacgcacgagaacctcacgtacgtgcagctgctgcgccgctgcgtgcccgacccggacaccgggctctacatgctgcagctggcaggccggggctccgccgtgcaccagctgagcgaggagctgcgctgtgccctgcgcgacgcccgcgtgacgccaggctcgggcgccctccagggccagagcgtctccgtctgggagctcctcttctaccgcgaggtgtccgaggaccggcgccaggacctgctgagcagataccgggcgggcacgctgaccgtggaggagctgggcgccaccctcacctcgctgctggcccaggcccaggcccaggcccgggccgaggccgaggccgggagcccgcgcccagacccccgggaggccctgcgtgcggccaccatggaggtcaaggtgggccgcctccgggggcgcgcggtgcccgtgtgggacgtgctggcgtccggctacgtgagcggggccgcccgggaggagctgctggccgagtttggctcggggaccctggacttgcccgcgctgacccgccggctgaccgccatcatcgaggaggccgaggaggcccccggggcccggccgcagctccaggacgcctggcgcggcccgcgggagccagggccagccgggcgaggggacggcgactcggggcgctcccagcgagagggccagggggagggcgagacccaggaggccgccgccgccgccgccgccgcccgccgccaggagcagaccctgcgtgatgccaccatggaggtgcagcgcgggcagttccaggggcggccggtctccgtgtgggacgtcctcttctcctcgtacctgagcgaggcccgccgagacgagctcctggcccagcacgcggccggcgccctgggcctgcccgacctcgtcgccgtcctcacccgggtcatcgaggagacggaggagcggctcagcaaggtgtccttccgcggcctgaggcgccaggtgtccgcctccgagctgcacacgtccgggatcctgggccccgagaccctgcgggacctggcccagggcactaagacgctgcaggaggtgacggagatggactcggtcaagcgctacctggagggcaccagctgcatcgcgggcgtcctggtgcccgccaaggaccagcccggccgccaggagaagatgagcatctaccaggccatgtggaagggcgtgctgcggcccggcacggccctggtgctgctggaggcgcaggcggccaccggcttcgtcatcgaccccgtgcgcaacctgaggctgtcggtggaggaggccgtggccgcgggcgtggtgggcggcgagatccaggagaagctgctgtcggccgagcgcgccgtcaccggctacaccgacccctacaccgggcagcagatctccctcttccaggccatgcagaaggacctcatcgtccgggagcacggcatccgcctgctggaggcccagatcgccacgggcggcgtcatcgaccccgtgcacagccaccgcgtgcccgtggacgtggcctaccggcgcggctacttcgacgaggagatgaaccgtgtcctggccgaccccagcgacgacaccaagggtttcttcgaccccaacacgcacgagaacctcacgtacgtgcagctgctgcgccgctgcgtgcccgacccggacaccgggctctacatgctgcagctggcaggccggggctccgccgtgcaccagctgagcgaggagctgcgctgtgccctgcgcgacgcccgcgtgacgccaggctcgggcgccctccagggccagagcgtctccgtctgggagctcctcttctaccgcgaggtgtccgaggaccggcgccaggacctgctgagcagataccgggcgggcacgctgaccgtggaggagctgggcgccaccctcacctcgctgctggcccaggcccaggcccaggcccgggccgaggccgaggccgggagcccgcgcccagacccccgggaggccctgcgtgcggccaccatggaggtcaaggtgggccgcctccgggggcgcgcggtgcccgtgtgggacgtgctggcgtccggctacgtgagcggggccgcccgggaggagctgctggccgagtttggctcggggaccctggacttgcccgcgctgacccgccggctgaccgccatcatcgaggaggccgaggaggcccccggggcccggccgcagctccaggacgcctggcgcggcccgcgggagccagggccagccgggcgaggggacggcgactcggggcgctcccagcgagagggccagggggagggcgagacccaggaggccgccgccgccgccgccgccgcccgccgccaggagcagaccctgcgtgatgccaccatggaggtgcagcgcgggcagttccaggggcggccggtctccgtgtgggacgtcctcttctcctcgtacctgagcgaggcccgccgagacgagctcctggcccagcacgcggccggcgccctgggcctgcccgacctcgtcgccgtcctcacccgggtcatcgaggagacggaggagcggctcagcaaggtgtccttccgcggcctgaggcgccaggtgtccgcctccgagctgcacacgtccgggatcctgggccccgagaccctgcgggacctggcccagggcactaagacgctgcaggaggtgacggagatggactcggtcaagcgctacctggagggcaccagctgcatcgcgggcgtcctggtgcccgccaaggaccagcccggccgccaggagaagatgagcatctaccaggccatgtggaagggcgtgctgcggcccggcacggccctggtgctgctggaggcgcaggcggccaccggcttcgtcatcgaccccgtgcgcaacctgaggctgtcggtggaggaggccgtggccgcgggcgtggtgggcggcgagatccaggagaagctgctgtcggccgagcgcgccgtcaccggctacaccgacccctacaccgggcagcagatctccctcttccaggccatgcagaaggacctcatcgtccgggagcacggcatccgcctgctggaggcccagatcgccacgggcggcgtcatcgaccccgtgcacagccaccgcgtgcccgtggacgtggcctaccggcgcggctacttcgacgaggagatgaaccgtgtcctggccgaccccagcgacgacaccaagggcttcttcgaccccaacacgcacgagaacctcacgtacgtgcagctgctgcgccgctgcgtgcccgacccggacaccgggctctacatgctgcagctggcaggccggggctccgccgtgcaccagctgagcgaggagctgcgctgtgccctgcgcgacgcccgcgtgacgccaggctcgggcgccctccagggccagagcgtctccgtctgggagctcctcttctaccgcgaggtgtccgaggaccggcgccaggacctgctgagcagataccgggcgagcacgctgaccgtggaggagctgggcgccaccctcacctcgctgctggcccaggcccaggcccaggcccgggccgaggccgaggccgggagcccgcgcccagacccccgggaggccctgcgtgcggccaccatggaggtcaaggtgggccgcctccgggggcgcgcggtgcccgtgtgggacgtgctggcgtccggctacgtgagcagggccgcccgggaggagctgctggccgagtttggctcggggaccctggacttgcccgcgctgacccgccggctgaccgccatcatcgaggaggccgaggaggcccccggggcccggccgcagctccaggacgcctggcgcggcccgcgggagccagggccagccgggcgaggggacggcgactcggggcgctcccagcgagagggccagggggagggcgagacccaggaggccgccgccgccaccgccgccgcccgccgccaggagcagaccctgcgtgatgccaccatggaggtgcagcgcgggcagttccaggggcggccggtctccgtgtgggacgtcctcttctcctcgtacctgagcgaggcccgccgagacgagctcctggcccagcacgcggccggcgccctgggcctgcccgacctcgtcgccgtcctcacccgggtcatcgaggagacggaggagcggctcagcaaggtgtccttccgcggcctgaggcgccaggtgtccgcctccgagctgcacacgtccgggatcctgggccccgagaccctgcgggacctggcccagggcactaagacgctgcaggaggtgacggagatggactcggtcaagcgctacctggagggcaccagctgcatcgcgggcgtcctggtgcccgccaaggaccagcccggccgccaggagaagatgagcatctaccaggccatgtggaagggcgtgctgcggcccggcacggccctggtgctgctggaggcgcaggcggccaccggcttcgtcatcgaccccgtgcgcaacctgaggctgtcggtggaggaggccgtggccgcgggcgtggtgggcggcgagatccaggagaagctgctgtcggccgagcgcgccgtcaccggctacaccgacccctacaccgggcagcagatctccctcttccaggccatgcagaaggacctcatcgtccgggagcacggcatccgcctgctggaggcccagatcgccacgggcggcgtcatcgaccccgtgcacagccaccgcgtgcccgtggacgtggcctaccggcgcggctacttcgacgaggagatgaaccgtgtcctggccgaccccagcgacgacaccaagggcttcttcgaccccaacacgcacgagaacctcacgtacgtgcagctgctgcgccgctgcgtgcccgacccggacaccgggctctacatgctgcagctggcaggccggggctccgccgtgcaccagctgagcgaggagctgcgctgtgccctgcgcgacgcccgcgtgacgccaggctcgggcgccctccagggccagagcgtctccgtctgggagctcctcttctaccgcgaggtgtccgaggaccggcgccaggacctgctgagcagataccgggcgggcacgctgaccgtggaggagctgggcgccaccctcacctcgctgctggcccaggcccaggcccaggcccgggccgaggccgaggccgggagcccgcgcccagacccccgggaggccctgcgtgcggccaccatggaggtcaaggtgggccgcctccgggggcgcgcggtgcccgtgtgggacgtgctggcgtccggctacgtgagcggggccgcccgggaggagctgctggccgagtttggctcggggaccctggacttgcccgcgctgacccgccggctgaccgccatcatcgaggaggccgaggaggcccccggggcccggccgcagctccaggacgcctggcgcggcccgcgggagccagggccagccgggcgaggggacggcgactcggggcgctcccagcgagagggccagggggagggcgagacccaggaggccgccgccgccgccgccgccgcccgccgccaggagcagaccctgcgtgatgccaccatggaggtgcagcgcgggcagttccaggggcggccggtctccgtgtgggacgtcctcttctcctcgtacctgagcgaggcccgccgagacgagctcctggcccagcacgcggccggcgccctgggcctgcccgacctcgtcgccgtcctcacccgggtcatcgaggagacggaggagcggctcagcaaggtgtccttccgcggcctgaggcgccaggtgtccgcctccgagctgcacacgtccgggatcctgggccccgagaccctgcgggacctggcccagggcactaagacgctgcaggaggtgacggagatggactcggtcaagcgctacctggagggcaccagctgcatcgcgggcgtcctggtgcccgccaaggaccagcccggccgccaggagaagatgagcatctaccaggccatgtggaagggcgtgctgcggcccggcacggccctggtgctgctggaggcgcaggcggccaccggcttcgtcatcgaccccgtgcgcaacctgaggctgtcggtggaggaggccgtggccgcgggcgtggtgggcggcgagatccaggagaagctgctgtcggccgagcgcgccgtcaccggctacaccgacccctacaccgggcagcagatctccctcttccaggccatgcagaaggacctcatcgtccgggagcacggcatccgcctgctggaggcccagatcgccacgggcggcgtcatcgaccccgtgcacagccaccgcgtgcccgtggacgtggcctaccggcgcggctacttcgacgaggagatgaaccgcgtcctggccgaccccagcgacgacaccaagggcttcttcgaccccaacacgcacgagaacctcacgtacctgcagcttctgcagagggccaccctggaccctgagacggggctcctatttctttctctctctctacagtgactgggcttcctccgtgcagttttctgcaactctggagaagttgaggcatacttgtgtgtctgggttgtttttttttttttttgtcattctttaattttgttgttttacccattcgttatctgtggaaaacgttttaagttgtcatgtgacagaaacttttcctttgtccatcgaggtgtttcataagttttttggtgtgttttctgggtcgtctatgtgtcatatggttttacttttctcccggaatt

SEQ ID NO: 57273 - DNA, 2078 bp, Homo Sapiens
atgggttgggcattaggaacggcctggccccacaaatcacacaactggggtgtagaacaaaatggttccacagatgacaccaggctggtccagggccgatgcaggccagaaccccgctgggaggactccccagaacaggcactgagctgaggaaaggcaggacacgtggtctgctaccgaccccaccagatcttgctgggactctgggcagctccggagtaagagcagcatgctctgcaacgaagagctaggtccaaggaccgcaggcggaggcaggaagtgtcaagatcccaggttacggaatggcaccaagtcggtaaccaaaggaagcaacaacccgggttttcaaggcagtcgtgcaaggcggcgcgggggcgaggccgaggccactccctcccacttccttgacgctatttcctgggaggagccggagctcgcggcccggagccaagagattcccagcccagtgctccaaaatactcggcctgggggaggctggtccgtgagcgtgcgcccggaccgttccgccatgcatagtggacccagcactacagcaagcctggcacgacctctaaggcggttcgcggcaacgtccgcacgtcggctcgttggtctaggggtatgattctcgcttcgggtgcgagaggtcccgggttcaaatcccggacgagccctcctttaccttttactgagacaagagtgtcttcaaggaatatgttacctgaccagcgctgcaggaggcttgactgtaagtcatcaatgtacagtaagctcttttgtggcaccgcggtagcagaaagcatctcaatccccagacccgcctggcatgtcaggaagagacgaggcacgcccagacttgggcaggtccctccctttctgcttcctgacttccttcctggtgtctcaactcggccaccacagcctggtttcgctttgattgacacgcgtcaatctatagttgtggatgacagtgttcgggagagcccaggaactgtcaaaacttggttctctgcagtcctgaaggcactctgtctctttcggtcactccatctgacgattggtgcctgaaatacacctacggtttctggtcagcgtttatcagtggttggaagaacagaacccctaggaaccctgctgtcagcacgcagagtgtaaagtctcagatcaaggattcggagaaaggtctctacaggtccctcctcgttagtatagtggttggttgggatgagtcgggttggacccgtgcggatccaggaaaacagcgatcgaggtaaaagtaatggctgccgtcgtctgcccagcgcgcaattgtgagtgaccttcaccgctagcgcgcgccacccaccccacatgaacctgtagggttatgcccagtctacagacgaggaaaccaagatccagggaagctgagtcaccggcagagctgggattacgtctaagatttgtccagggggcgagaactgcagcgacaccatgatgatttatcatctccagaaaacaaaaaaaaaggcctagacacataaaaatggcttctctgtagagtgagctcaacgagctcaatgtgattccagttaaggaattgggccttaagccaaatgcgcctaaacgcaacttgcctctctattatttatccagaggatgaatttaattcctacgtacatgcgcccacatctcgtcagctggtgcctcagagaaatgcgctgacaaatcttaaaggtggggcttcatgacaaaagtccgcccgttattgctgctcaacagacccatcaagtcacgctgttggacaggcctcgtggcgcaacggtagcgcgtctgactccagatcagaaggttgcgtgttcaaatcacgtcggggtcaaacaaaacattgttttccctaatcaaatagacctacggtgacatttttcaggataggaaaaaaaaaaagcctcctcagtagaaggataggaggggaatgagacaaatatgaacgttattcagaagttgggtgcagactttcaacattatgtgatatatccctgtggcaaaactgcgcatgtatccctaaggtctataaaagtaaaaataaatttaaaaat

SEQ ID NO: 57274 - DNA, 1651 bp, Homo Sapiens
acggcacgaggagccggcgaggagttccccgaaacttgttggaactccgggctcgcgcggaggccaggagctgagcggcggcggctgccggacgatgggagcgtgagcaggacggtgataacctctccccgatcgggttgcgagggcgccgggcagaggccaggacgcgagccgccagcggcgggacccatcgacgacttcccggggcgacaggagcagccccgagagccagggcgagcgcccgttccaggtggccggaccgcccgccgcgtccgcgccgcgctccctgcaggcaacgggagacgcccccgcgcagcgcgagcgcctcagcgcggccgctcgctctccccatcgagggacaaacttttcccaaacccgatccgagcccttggaccaaactcgcctgcgccgagagccgtccgcgtagagcgctccgtctccggcgagatgtccgagcgcaaagaaggcagaggcaaagggaagggcaagaagaaggagcgaggctccggcaagaagccggagtccgcggcgggcagccagagcccagccttgcctccccaattgaaagagatgaaaagccaggaatcggctgcaggttccaaactagtccttcggtgtgaaaccagttctgaatactcctctctcagattcaagtggttcaagaatgggaatgaattgaatcgaaaaaacaaaccacaaaatatcaagatacaaaaaaagccagggaagtcagaacttcgcattaacaaagcatcactggctgattctggagagtatatgtgcaaagtgatcagcaaattaggaaatgacagtgcctctgccaatatcaccatcgtggaatcaaacgagatcatcactggtatgccagcctcaactgaaggagcatatgtgtcttcagagtctcccattagaatatcagtatccacagaaggagcaaatacttcttcatctacatctacatccaccactgggacaagccatcttgtaaaatgtgcggagaaggagaaaactttctgtgtgaatggaggggagtgcttcatggtgaaagacctttcaaacccctcgagatacttgtgcaagtaagaaaagaaatcctgtgtgtcgcttatgtctataactccttgtttcagatgattctatgtctcatgattgattgttgctttttttccaattttgttgcatcatgttgaataatgctgttttatatgtagagtcttttaaaacattcacaccattcgtcatcactcctctgtcatatgcagttttgttttttgctcttttcaatgtgtgtgaggtgttttttgtttttgtttttgtttttttgccatgttatttatagtgttgctttccttgtgctttccttgtggttttcttggttggttattcagaaaagatgtgcagatatcacagaggcctatagccttttggtatctacttctacatccaatgtatgaattaagctgtaagataatgttgctttcttatcccagtgatcacctgccaaatgaataagacaacaaagagaagcagaagggcaagaagattatttactgacatatatctattacacttgggattgtgcttactgttgcataactattttttaaacggagtttagttttatattgctagtaaaaaaaaaaaaaaaaaa

SEQ ID NO: 57275 - DNA, 2076 bp, Homo Sapiens
gcgagaagagcagacaccgtgctcctggaatcacccagcatgttgcaaggtctcctgccagtcagtctcctcctctctgttgcagtaagtgctataaaagaactccctggggtgaagaagtatgaagtggtttatcctataagacttcatccactgcataaaagagaggccaaagagccagagcaacaggaacaatttgaaactgaattaaagtataaaatgacaattaatggaaaaattgcagtgctttatttgaaaaaaaacaagaacctccttgcaccaggctacacggaaacatattataattccactggaaaggagatcaccacaagcccacaaattatggatgattgttattatcaaggacatattcttaatgaaaaggtttctgacgctagcatcagcacatgtaggggtctaaggggctacttcagtcagggggatcaaagatactttattgaacctttaagccccatacatcgggatggacaggagcatgcactcttcaagtataaccctgatgaaaagaattatgacagcacctgtgggatggatggtgtgttgtgggcccacgatttgcagcagaacattgccctacctgccaccaaactagtaaaattgaaagacaggaaggttcaggaacatgagaaatacatagaatattatttggtcctggataatggtgagtttaaaaggtacaatgagaatcaagatgagatcagaaagagggtatttgagatggctaattatgtcaacatgctttataaaaagctcaatactcatgtggccttagttggtatggaaatctggactgacaaggataagataaagataaccccaaatgcaagcttcaccttggagaatttttctaaatggagggggagtgttctctcaagaagaaagcgtcatgatattgctcagttaatcacagcaacagaacttgctggaacgactgtgggtcttgcatttatgtctacaatgtgttctccttattctgttggcgttgttcaggaccacagcgataatcttcttagagttgcagggacaatggcacatgaaatgggccacaactttggaatgtttcatgacgactattcttgcaagtgtccttctacaatatgtgtgatggacaaagcactgagcttctatatacccacagacttcagttcctgcagccgtctcagctatgacaagttttttgaagataaattatcaaattgcctctttaatgctccattgcctacagatatcatatccactccaatttgtgggaaccagttggtggaaatgggagaggactgtgattgtgggacatctgaggaatgtaccaatatttgctgtgatgctaagacatgtaaaatcaaagcaacttttcaatgtgcattaggagaatgttgtgaaaaatgccaatttaaaaaggctgggatggtgtgcagaccagcaaaagatgagtgcgacctgcctgaaatgtgtaatggtaaatctggtaattgtcctgatgatagattccaagtcaatggcttcccttgccatcacgggaagggccactgcttgatggggacatgccccacactgcaggagcagtgcacagagctgtggggaccaggtaggaggacaaatcctttcccctgtgcatgtgcgaaggaaaatcatttcagatgacagtgtttaaccatggtcaaaggaccattctgtcctatccttcttagaagcttcgaactcaaaatcatggaaaggttttaagatttgaggttggttttagggttgctagatttagcaagtaaaaataaggatggccccgttaaattttaacttaaaattaacaagttttttgttaattttttgttttttgtctcagcatcagtatatcccatgcaatatttgaggtgtgctcatactaaaattatttgtgtatctgaaattcaaattaaactgggtgtctttttcttttcatctggcaaccctactaagatcataaacccttggaaatctgtgtgtgtgcgggtgtgtgtgtgtgtgtgtgtgcaggggtggcagaagtactgtgggatgggacagaaataaaaaaaaaaaaaa

SEQ ID NO: 57276 - DNA, 3427 bp, Homo Sapiens
gtggattacatcctttccctgcggaggaccagggcaagtttcctgcctgcacggcacaggagagcaaacttctacagacagaccaaggcttccatttgctgctgacacatggaactgaggtgaaattgtgctccatgattttacagatttcataacgtttaagagacgggactcaggtcatcaaaatgaaagccctcatctttgcagctgctggcctcctgcttctgttgcccactttttgtcagagtggcatggaaaatgatacaaacaacttggcaaagccaaccttacccattaagacctttcgtggagctcccccaaattcttttgaagagttccccttttctgccttggaaggctggacaggagccacgattactgtaaaaattaagtgccctgaagaaagtgcttcacatctccatgtgaaaaatgctaccatggggtacctgaccagctccttaagtactaaactgatacctgccatctacctcctggtgtttgtagttggtgtcccggccaatgctgtgaccctgtggatgcttttcttcaggaccagatccatctgtaccactgtattctacaccaacctggccattgcagattttcttttttgtgttacattgccctttaagatagcttatcatctcaatgggaacaactgggtatttggagaggtcctgtgccgggccaccacagtcatcttctatggcaacatgtactgctccattctgctccttgcctgcatcagcatcaaccgctacctggccatcgtccatcctttcacctaccggggcctgcccaagcacacctatgccttggtaacatgtggactggtgtgggcaacagttttcttatatatgctgccatttttcatactgaagcaggaatattatcttgttcagccagacatcaccacctgccatgatgttcacaacacttgcgagtcctcatctcccttccaactctattacttcatctccttggcattctttggattcttaattccatttgtgcttatcatctactgctatgcagccatcatccggacacttaatgcatacgatcatagatggttgtggtatgttaaggcgagtctcctcatccttgtgatttttaccatttgctttgctccaagcaatattattcttattattcaccatgctaactactactacaacaacactgatggcttatattttatatatctcatagctttgtgcctgggtagtcttaatagttgcttagatccattcctttattttctcatgtcaaaaaccagaaatcactccactgcttaccttacaaaatagtgaaatgatcttagagaacaaggacagccatcacagagaacgtctgttttcaagaacaacataagcatagtgcaaggagctccatttccgagctcctaagaaatatgcttcaaaggtcaaacattacaaaagcattagtagtttgtttgtttgtttttgagactgagtctcactttatcacccagactggcgtgcagtggcactatcttggctcattgcaacctctgcctcccaggtcagcctcccaagtagctgggattacaccaccatgcccagctactaaaaatacttgtatttttagtagagacggggtttcaccatgttgaccaggctggtcttgaactcctgacctcaagtgatcttccggcctcagcctcccaaagtgctggattacaggcgtgagccactgagccagccagcattagtaatttttaaaaacactttatcagtattttaaaaatgttaatgcaggagaaaagatatcacaactctatggaaaatgacatttccatttgccttattgctacttcaagctctttaaatcaccatcttccctatttctgtgagtggtattgccatccttgacatttgacatcattttttattctttggtctcttttgactctcatgctggtggctgcctcatcaactgattctatctttgtagggtccctcaccagggtcttttatctagtttcacctttgccttcttttttcctttttttaatagagacagtgtctcgcttcgtcacctggctgaagtgcagtagcctgatcatagctcacttcagcctccaactcctgggctcaagcaatcctgctgtctcagcctcccaagtaactaagactacaggcatgcaccaccatacccaactaattttattttttattttttgcagagatggagtctcactgttgcccaggctggtcttgaactcctggtctcgagtgatcttcctatctcagcctcccaaagtgctgggactacaggcatgagccactacgtccaggccacctctaccttctaaccattctctccactgccagcctaccctccaccacttcacaagtcctgccagattaatcttccttagatatcagttaggatacatcactaaaacatttccactaactccactgtttctataataaatcataaatctttagcctggcattcaaggctaacttgctaatcacacttcccattaaaccttgcttatgatataggcaccaaccaaacctcttgctctgctatatctccactctgcctcagactgaaaagctagtcctaacgtctttgccttaattctgttcattttttcaagtccttgaaggaccattcttccctgattctcaggctagaagtgtcacttttcttatctgtacttccaaagcactttcgtatatttttattatggcatttatatatagttcatttatatttaaattttaattccatgaacaatcaagtaccaagtataatggagaaggtgctcatcctctgccttccttgagcttctgggtgatgccaggcccaagtctttgtggcacccagctccatgctttgaatactatgtggctgaatgaatttttaaaatctcaaagcagttaaacagcaggaaagcccattaacttcgtactgaaaaagcaacatactgtgatgatacgggatgacatcatttcaggttgggcatacaaaaaagtaaggaagctaaactaagactatactcaccaggccatttagaagttttaaataatgcctccactattttttttcttagacatagcttttaatggggaaatggaattttgttattaatacccattatattcctgtaagtaaatgactatttttcccttaactcagtgattagacaggaaggaagacattagtgattagacaggagggaagatattagtgattagacagcagggaagatattagtggtaaagagtgaatgatagtagtgaatataaatggggctgaggaaactttaagcataaaagattcctgagatgactttacaagtctgtacgaatctgccttgactgtatatttcatactgcccaacaaaacaataaaaaacaattttaaatgcaaaaaaaaaaaaaaaaaa

SEQ ID NO: 57277 - DNA, 437 bp, Homo Sapiens
atgcctgaaccagctaagtcagctcccgccccgaagaagggctccaagaaggcggtgaccaaggcacagaagaaggatggcaagaagcgcaagcgcagccgcaaggagagctattccgtgtacgtgtacaaggtgctgaagcaggtccaccccgacaccggcatctcgtccaaggctatggggattatgaactccttcgtcaacgacattttcgagcgcattgcaggcgaggcttcccgcctggcgcattataacaagcgctcgaccatcacttccagggagatccaaacggctgtgcgcctgctgctacccggggagctggccaaacacgcggtgtcggagggcaccaaggcggtcaccaagtacaccagctccaagtaaactagttacctgggtaaaagcgctaacgacccaaaggctcttctaagagccaccca

SEQ ID NO: 57278 - DNA, 4005 bp, Homo Sapiens; identical to SEQ ID NO: 30974

SEQ ID NO: 57279 - DNA, 6369 bp, Homo Sapiens
atgtcctgtcctgatgagttggtggttcctgctgtagccatcggcctcgtgtgccccgagcgcctggcggtgcccacccctcccacaggaggtcctcaggaagcacggagacatcgggtgcggggggcaatggcactgcagctctgggccctgaccctgctgggcctgctgggcgcaggtgccagcctgaggccccgcaagctggacttcttccgcagcgagaaagagctgaaccacctggctgtggatgaggcctcaggcgtggtgtacctgggggcggtgaatgccctctaccagctggatgcgaagctgcagctggagcagcaggtggccacgggcccggccctggacaacaagaagtgcacgccgcccatcgaggccagccagtgccatgaggctgagatgactgacaatgtcaaccagctgctgctgctcgaccctcccaggaagcgcctggtggagtgcggcagcctcttcaagggcatctgcgctctgcgcgccctgagcaacatctccctccgcctgttctacgaggacggcagcggggagaagtctttcgtggccagcaatgatgagggcgtggccacagtggggctggtgagctccacgggtcctggtggtgaccgcgtgctgtttgtgggcaaaggcaatgggccacacgacaacggcatcatcgtgagcactcggctgttggaccggactgacagcagggaggcctttgaagcctacacggaccacgccacctacaaggccggctacctgtccaccaacacacagcagttcgtggcggccttcgaggacggcccctacgtcttctttgtcttcaaccagcaggacaagcacccggcccggaaccgcacgctgctggcacgcatgtgcagagaagaccccaactactactcctacctggagatggacctgcagtgccgggaccccgacatccacgccgctgcctttggcacctgcctggccgcctccgtggctgcgcctggctctggcagggtgctatatgctgtcttcagcagagacagccggagcagtggggggcccggtgcgggcctctgcctgttcccgctggacaaggtgcacgccaagatggaggccaaccgcaacgcctgttacacaggcacccgggaggcccgtgacatcttctacaagcccttccacggcgatatccagtgcggcggccacgcgccgggctccagcaagagcttcccatgtggctcggagcacctgccctacccgctgggcagccgcgacgggctcagaggcacagccgtgctgcagcgtggaggcctgaacctcacggccgtgacggtcgccgccgagaacaaccacactgttgcttttctgggcacctctgatggccggatcctcaaggtgtacctcaccccagatggcacctcctcagagtacgactctatccttgtggagataaacaagagagtcaagcgcgacctggtactgtctggagacctgggcagcctgtacgccatgacccaggacaaggtgttccggctgccggtgcaggagtgcctgagctacccgacctgcacccagtgccgcgactcccaggacccctactgcggctggtgcgtcgtcgagggacgatgcacccggaaggccgagtgtccgcgggccgaggaggccagccactggctgtggagccgaagcaagtcctgcgtggccgtcaccagcgcccagccacagaacatgagccggcgggcccagggggaggtgcagctgaccgtcagccccctccctgccctgagcgaggaggacgagttgctgtgcctttttggggagtcgccgccacaccccgcccgcgtggagggcgaggccgtcatctgcaactccccaagcagcatccccgtcacaccgccaggccaggaccacgtggccgtgaccatccagctcctccttagacgaggcaacatcttcctcacgtcctaccagtaccccttctacgactgccgccaggccatgagcctggaggagaacctgccgtgcatctcctgcgtgagcaaccgctggacctgccagtgggacctgcgctaccacgagtgccgggaggcttcgcccaaccctgaggacggcatcgtccgtgcccacatggaggacagctgtccccagttcctgggacccagccccctggtgatccccatgaaccacgagacagatgtgaacttccagggcaagaacctggacaccgtgaagggttcctccctgcacgtgggcagtgacttgctcaagttcatggagccggtgaccatgcaggaatctgggaccttcgcctttcggaccccaaagctgtcccacgatgccaacgagacgctgcccctgcacctctacgtcaagtcttacggcaagaatatcgacagcaagctccatgtgaccctctacaactgctcctttggccgcagcgactgcagcctgtgccgggccgctaaccccgactacaggtgtgcgtggtgcgggggccagagcaggtgcgtgtatgaggccctgtgcaacaccacctccgagtgcccgccgcccgtcatcaccaggatccagcctgagacgggccccctgggtgggggcatccgcatcaccatcctggggtccaatttgggcgtccaagcaggggacatccagaggatctctgtggccggccggaactgctcctttcagccggaacgttactccgtgtccacccggatcgtgtgtgtgatcgaggctgcggagacgcctttcacggggggtgtcgaggtggacgtcttcgggaaactgggccgttcgcctcccaatgtccagttcaccttccaacagcccaagcctctcagtgtggagccgcagcagggaccgcaggcgggcggcaccacactgaccatccacggcacccacctggacacgggctcccaggaggacgtgcgggtgaccctcaacggcgtcccgtgtaaagtgacgaagtttggggcgcagctccagtgtgtcactggcccccaggcgacacggggccagatgcttctggaggtctcctacggggggtcccccgtgcccaaccccggcatcttcttcacctaccgcgaaaaccccgtactgcgagccttcgagccgctacgaagctttgccagtggtggccgcagcatcaacgtcacgggtcagggcttcagcctgatccagaggtttgccatggtggtcatcgcggagcccctgcagtcctggcagccgccgcgggaggctgaatccctgcagcccatgacggtggtgggtacagactacgtgttccacaatgacaccaaggtcgtcttcctgtccccggctgtgcctgaggagccagaggcctacaacctcacggtgctgatcgagatggacgggcaccgtgccctgctcagaacagaggccggggccttcgagtacgtgcctgaccccacctttgagaacttcacaggtggcgtcaagaagcaggtcaacaagctcatccacgcccggggcaccaatctgaacaaggcgatgacgctgcaggaggccgaggccttcgtgggtgccgagcgctgcaccatgaagacgctgacggagaccgacctgtactgtgagcccccggaggtgcagcccccgcccaagcggcggcagaaacgagacaccacacacaacctgcccgagttcattgtgaagttcggctctcgcgagtgggtgctgggccgcgtggagtacgacacacgggtgagcgacgtgccgctcagcctcatcttgccgctggtcatcgtgcccatggtggtcgtcatcgcggtgtctgtctactgctactggaggaagagccagcaggccgaacgagagtatgagaagatcaagtcccagctggagggcctggaggagagcgtgcgggaccgctgcaagaaggaattcacagacctgatgatcgagatggaggaccagaccaacgacgtgcacgaggccggcatccccgtgctggactacaagacctacaccgaccgcgtcttcttcctgccctccaaggacggcgacaaggacgtgatgatcaccggcaagctggacatccctgagccgcggcggccggtggtggagcaggccctctaccagttctccaacctgctgaacagcaagtctttcctcatcaatttcatccacaccctggagaaccagcgggagttctcggcccgcgccaaggtctacttcgcgtccctgctgacggtggcgctgcacgggaaactggagtactacacggacatcatgcacacgctcttcctggagctcctggagcagtacgtggtggccaagaaccccaagctgatgctgcgcaggtctgagactgtggtggagaggatgctgtccaactggatgtccatctgcctgtaccagtacctcaaggacagtgccggggagcccctgtacaagctcttcaaggccatcaaacatcaggtggaaaagggcccggtggatgcggtacagaagaaggccaagtacactctcaacgacacggggctgctgggggatgatgtggagtacgcacccctgacggtgagcgtgatcgtgcaggacgagggagtggacgccatcccggtgaaggtcctcaactgtgacaccatctcccaggtcaaggagaagatcattgaccaggtgtaccgtgggcagccctgctcctgctggcccaggccagacagcgtggtcctggagtggcgtccgggctccacagcgcagatcctgtcggacctggacctgacgtcacagcgggagggccggtggaagcgcgtcaacacccttatgcactacaatgtccgggatggagccaccctcatcctgtccaaggtgggggtctcccagcagccggaggacagccagcaggacctgcctggggagcgccatgccctcctggaggaggagaaccgggtgtggcacctggtgcggccgaccgacgaggtggacgagggcaagtccaagagaggcagcgtgaaagagaaggagcggacgaaggccatcaccgagatctacctgacgcggctgctctcagtcaagggcacactgcagcagtttgtggacaacttcttccagagcgtgctggcgcctgggcacgcggtgccacctgcagtcaagtacttcttcgacttcctggacgagcaggcagagaagcacaacatccaggatgaagacaccatccacatctggaagacgaacagcttaccgctccggttctgggtgaacatcctcaagaacccccacttcatctttgacgtgcatgtccacgaggtggtggacgcctcgctgtcagtcatcgcgcagaccttcatggatgcctgcacgcgcacggagcataagctgagccgcgattctcccagcaacaagctgctgtacgccaaggagatctccacctacaagaagatggtggaggattactacaaggggatccggcagatggtgcaggtcagcgaccaggacatgaacacacacctggcagagatttcccgggcgcacacggactccttgaacaccctcgtggcactccaccagctctaccaatacacgcagaagtactatgacgagatcatcaatgccttggaggaggatcctgccgcccagaagatgcagctggccttccgcctgcagcagattgccgctgcactggagaacaaggtcactgacctctgacctacaatctccagtgctgccttgggacataggtacctgaggtacctgagagcccctcaggggaggaggccgagtggctgtggctgaggcccccaccctcccctggaacgcgccccaagccggagtgggtgcagccggaacccgcccagcgtctagactgtagcatcttcctctgagcaataccgccgggcaccgcaccagcaccagccccagccccagctccctccggccgcagaaccagcatcgggtgttcactgtcgagtctccagtgatttgaaaatgtgccttacgctgccacgctgggggcagctggcctccgcctccgcccacgcaccagcagccgcctccatgccctaggttgggcccctgggggatctgagggcctgtggcccccagggcaagttcccagatcctatgtctgtctgtccaccacgagatgggaggaggagaaaaagcggtacgatgccttcctgacctcaccggcctccccaagggtgccggcactctgggtggactcacggctgctgggccccacgtcaaaggtcaagtgagacgtaggtcaagtcctacgtcggggcccagacatcctggggtcctggtctgtcagacaggctgccctagagccccacccagtccggggggactgggagcagttccaagaccaccccacccctttttgtaaatcttgttcattgtaaatcaaatacagcgtctttttcactc

SEQ ID NO: 57280 - DNA, 1381 bp, Homo Sapiens
ggcttccagtggattctccgaggccctgatgtagaaacttccccattgggtgcaccaagagcagcctcacatggtgtgggctgacatcaagagctgccagatccaacaggaagatggccaatctttcctaagctgctcaccttacaagaaaacgaatcgtactgctaagaattcaaacttcagcagtcatggggagccttggaaggagcccgaatcactgatggaattggacagtgcatggagatggttcagcaggacaagggtaagtgcaggggcaagtccaggtcatactgagagacaacgagtggcgctgacagagacagacaaagataaaatcaaaagtttgtgcttcatcttcaaaaactcaaactaataacaaacttggccttatgagaaataataagtatttttctatttacatgagaatttaatctcaaaacaggaatcagaaacatattaagtccagggcataaaacctaaaccactgctcatatttattctttctaaatagagcaaagtgtaaaatcttctccataaaatgcacattgtgcttatgaaaaggccagtcttagtgagaatcattggtattccatagaagagtgaattaaacacagccaagggaagacccaagtctcatacttctcttgtatattccagagttccaggggaattccaggtgatagaggtgatctcccatactgttaaagcaaggttgcagacacttgggaattttggtcccagtactctaggaggtcacacctctgtcctggaaaatactacaggaatgtatactcttcctatgactcattctggtcattcttccagcatcacaaaaaccaaaaaaaaaaaaaggaaatatgtccaaatacatgatttgctatccctcctcttcaggtttcttacctgttacttacggataacagcattaccacaggattatgatgaagatacaatgtccaaatataaacacagttttgagcaaaatgccttgtacgaattggtcaatgaacaactagtaaataattatgtgaatatttactgaattatatggatcctatgaataattactgaataattcatgtgattgcttttattggcagtgctgaaaactcatccccgtgtgacctcaagtaagccatgtaactctgtgaacctgcagttttatcatttttaaaataaagaaacatgacagattttcattatgacacagaatgtcaggtctcccagatgccagaaaatacatttacttaaagccgttgatacgtcttaaagcggtttccttacagtgtcattggaggacagtgtggagtgcagagagacatgctttgaaatgggattgatccagtcctccttccttcactaccacatgaatgctgggcag

SEQ ID NO: 57281 - DNA, 3475 bp, Homo Sapiens
gcgggcgcatgcgcaagggggcgcgccgcctctgccccgcggcgagggtgtctatggagaggcggcggccgcggctgctgaggcggaggctgaggcagtggcgatggcgccctttcctgaagaagtggacgtcttcaccgccccacactggcggatgaagcagctggtggggctctactgcgacaagctttctaaaaccaatttttccaacaacaacgatttccgtgctcttctgcagtctttgtatgctactttcaaggagttcaaaatgcatgagcagattgaaaatgaatacattattggtttgcttcaacaacgcagccagaccatttataatgtacattctgacaataaactctccgagatgcttagcctctttgaaaagggactgaagaatgttaagcctactactgttgactggaagccttaccaataacataaaacaatcgaataacaattatttcatgtattatatgtaaaatatatatactggattcttacagtaagaatgaatatgaacagttaaattatgcaaaacaactgaaagagagattggaggcttttacaagagattttcttcctcacatgaaagaggaagaggaggtttttcagcccatgttaatggaatattttacctatgaagagcttaaggatattaaaaagaaagtgattgcacaacactgctctcagaaggatactgcagaactccttagaggtcttagcctatggaatcatgctgaagagcgacagaagttttttaaatattccgtggatgaaaagtcagataaagaagcagaagtgtcagaacactccacaggtataacccatcttcctcctgaggtaatgctgtcaattttcagctatcttaatcctcaagagttatgtcgatgcagtcaagtaagcatgaaatggtctcagctgacaaaaacgggatcgctttggaaacatctttaccctgttcattgggccagaggtgactggtatagtggtcccgcaactgaacttgatactgaacctgatgatgaatgggtgaaaaataggaaagatgaaagtcgtgcttttcatgagtgggatgaagatgctgacattgatgaatctgaagagtctgcggaggaatcaattgctatcagcattgcacaaatggaaaaacgtttactccatggcttaattcataacgttctaccatatgttggtacttctgtaaaaaccttagtattagcatacagctctgcagtttccagcaaaatggttaggcagattttagagctttgtcctaacctggagcatctggatcttacccagactgacatttcagattctgcatttgacagttggtcttggcttggttgctgccagagtcttcggcatcttgatctgtctggttgtgagaaaatcacagatgtggccctagagaagatttccagagctcttggaattctgacatctcatcaaagtggctttttgaaaacatctacaagcaaaattacttcaactgcgtggaaaaataaagacattaccatgcagtccaccaagcagtatgcctgtttgcacgatttaactaacaagggcattggagaagaaatagataatgaacacccctggactaagcctgtttcttctgagaatttcacttctccttatgtgtggatgttagatgctgaagatttggctgatattgaagatactgtggaatggagacatagaaatgttgaaagtctttgtgtaatggaaacagcatccaactttagttgttccacctctggttgttttagtaaggacattgttggactaaggactagtgtctgttggcagcagcattgtgcttctccagcctttgcgtattgtggtcactcattttgttgtacaggaacagctttaagaactatgtcatcactcccagaatcttctgcaatgtgtagaaaagcagcaaggactagattgcctaggggaaaagacttaatttactttgggagtgaaaaatctgatcaagagactggacgtgtacttctgtttctcagtttatctggatgttatcagatcacagaccatggtctcagggttttgactctgggaggagggctgccttatttggagcaccttaatctctctggttgtcttactataactggtgcaggcctgcaggatttggtttcagcatgtccttctctgaatgatgaatacttttactactgtgacaacattaacggtcctcatgctgataccgccagtggatgccagaatttgcagtgtggttttcgagcctgctgccgctctggcgaatgacccttgacttctgatctttgtctacttcatttagctgagcaggctttctttcatgcactttactcatagcacatttcttgtgttaaccatccctttttgagcgtgacttgttttggccccatttcttacaacttcagaaatcttaatttaccagtgaattgtaatgttgtttctcttgcaaattatacttttggtttagaaagggattaggtcttttcaaaagggtgagaacagtcttacatttttcttttaaatgaaatgctttaaagaatgttggtaatgccatgtcatttaaagtatttcatagataattttgagttttaaagtccatggaggtgattggttctctttacacattaacactgtaccaagctttgcagatcttttccgacacacatgtctgaagacttattttcaaagacagcacatttttggaaactaatctcttttccgtaatatttcctttatttcaatgattctcagaaggccaattcaaacaaacccacatttaaggttctttaggattatagaataaattggcttctgagtgttagctcagtgagctaggaaagcaccaatcgatatttgtttcctttagggatactttgttctcaccactgtccctatgtcatcaaatttgggagagattttttaaaataccacaatcatttgaagaaatgtataaataaaatctactttgaggactttaccaagtaatactgttgtgttgtgatttttattataaatctcaatccaggtttactttagtatagaataggactacatactttgtctttggacctcccatgaacttattaccctgacaaatagttttagacagatactgaattttattgagctgaattttctttttgaaatgagttattcagtagtcaaaatttgaatccgtaagtatatctactttgctttgttaaaacatcatgagagtggaggcctgccacccagaaaggcacatactagtgccttttagtacaattttatgtcatgtagaagaaaatggcaatgttcctcctattgatacagatacaggcatatgtcatcttattgcgttttgctttattgcactttgcaaataatgcattttttacaaatggaaggtttatggcaactctgcgttgagccagtctattggtgccatgtttccaataaaacttctcctttcatgtctcgt

SEQ ID NO: 57282 - DNA, 8950 bp, Homo Sapiens
gtgagccaggagttgatggtggtctgttatacccaacaaggaacagcaactggaactgtgccgacttccgtgttgtcttactctgattacatatccaggcctgaggaccacaccagtgttgtccgctttgacaaagatgaacgggagaaactgtgtcggatagtcataattgatgactctttgtacgaggaggaggaaaccttccatgtccttctgagcatgcccatggggggaagaatcggatcagagttcccaggggctcaagttacaatcgttcctgacaaagatgatgaacccatcttttacttcggtgatgtggaatactctgtggatgagagtgctggctatgtggaagtgcaggtgtggagaacgggcactgacctgtccaagtcttctagtgtcacagtgaggtctcggaaaacagatcctccctctgcagatgctggaacagactatgtgggcatcagccgtaatttagattttgcacctggagtcaacatgcagcctgttcgtgttgtcattctggatgaccttggacaaccagcgctggagggaattgagaaatttgaactggtgcttcgcatgcctatgaacgcagcccttggcgagcccagcaaagccacagtgtccataaatgactctgtctccgatttgcctaagatgcaattcaaagaacgaatatatactggcagcgaaagtgatgggcagatagttacaatgatccataggactggggatgtccagtacagatcttcagtgagatgctacacccggcaggggtctgcacaggtgatgatggactttgaagaacgcccaaacactgatacctccatcatcacattcctccctggtgagacagaaaagccctgcattcttgagctgatggacgatgtgctctatgaggaggtagaggagctccgcctggtactcggcactccacaaagcaactctccctttggggctgcagttggtgaacaaaatgaaactctcataaggatccgagatgatgctgataagactgttattaaatttggagaaaccaaatttagtgtcactgaacccaaagaacctggagagtcggtggttataagaattccagtgattcgccaaggagacacttcaaaggtttccattgtgagagtccacaccaaggatggctcggccacctctggagaagactaccaccctgtgtcagaagaaattgagtttaaggaaggggaaacccagcacgtggttgaaatcgaagttatctttgacggggtgagagagatgagagaggccttcactgttcacctaaaacctgatgaaaatatgatagcagagatgcagttgacgaaagccattgtgtacatagaagaaatgagcagcatggcagatgtcacttttccttctgtccctcaaattgtatccctgttgatgtatgacgacacttccaaagctaaggagagtgctgaacccatgtctggctatcctgtcatctgtatcacagcttgcaaccccaaatattcagactacgataaaacaggctctatctgtgcaagtgagaacatcaatgacactttgacgcggtaccggtggctgattagtgcacctgcgggccctgacggtgtgaccagccctatgagagaagtggacttcgacaccttttttacgtcatccaagatggtcacactggactccatatactttcagcctggctcccgggtacagtgcgcagctcgtgctgtgaacaccaatggggatgaaggcctggagctcatgagccctattgtaaccatcagcagagaagaaggtctttgtcagccccgtgtacctggggttgttggagcagagccgttctcagctaaattgcgctacacaggccctgaggatgcagactacacaaaccttatcaagctcactgtcacaatgccacacatagatggcatgctccccgtgatctccactagagagctttccaactttgagctcaccctcagccctgatggcacaagagttggaaaccacaagtgctccaacctcctggattatactgaagtgaagactcattatggtttcttgactgatgctaccaaaaatccagaaataattggagagacatatccttaccagtacagcttgtccatcagaggttccactaccttgcgcttctaccggaacctgaacctagaggcctgtttatgggagttcgttagctactatgacatgtcagaactccttgctgactgtggtggcaccattggaacagatggacaggtcctaaacctagtgcagtcctatgtgacccttcgagtccctctgtatgtttcctacgtgttccattcccccgtgggggtaggaggctggcagcattttgacttgaagtcagagcttcgtctaacttttgtgtacgacaccgccatcttgtggaatgatggaattggcagccccccagaggctgaacttcaaggttctctctatccaaccagcatgcgcatcggtgatgaggggcgcttggccgtgcacttcaagacagaggctcagttccatggcttatttgtgctgtcacatcccgcatcctttacaagctcagtgatcatgtcagctgatcatccaggcctgacattttccctccgcctcataaggagtgaaccaacctataaccagccagtacagcagtggagctttgtctctgactttgccgtacgtgactactcagggacctatactgtgaagctggtgccatgcactgccccatcacatcaggaataccgcctgccagtcacctgcaaccccagagaacctgtcacctttgaccttgacatccgattccaacaggtcagtgatccagtggctgctgagtttagcttgaacacccaaatgtacctgctctctaagaagagtctctggttgtctgatggatccatgggattcgggcaagagagtgatgttgcttttgcagaaggtgatataatttatggtcgtgtcatggtggatcctgtccagaatctgggtgactccttttactgcagcattgagaaggtgtttctatgcactggagctgatggctatgttcccaagtatagtccaatgaatgcagaatatggctgcttagccgactctccttcactcttatatagatttaaaattgtggacaaagctcagccagagacacaagcgaccagttttggaaatgtcctatttaatgccaaactagcagtggatgaccctgaagccattctcttagtgaatcagcctggatctgatggatttaaagtcgactcaacaccactctttcaggtcgctctaggccgagaatggtatatacatacgatctatacagtgagatcgaaagacaatgccaatcgaggtattggcaaaagaagtgtggagtaccattctctggtgagtcaaggaaagccccaatccaccaccaagagccggaagaagagagagatcaggagcacaccctcactggcatgggagattggtgctgaaaacagtcgaggaacaaacatccagcacattgccctggaccgcaccaagaggcagatcccccatgggagagcacctccagatggcatcctcccctgggagctcaacagccccagctctgcagtcagcctggtcactgtggtgggaggcaccacggtagggttactcaccatctgcctcactgtcattgcagtgctgatgtgcaggggcaaggaaagtttcagggggaaggatgccccgaaaggctccagcagcagtgagcccatggtgcccccacagagccatcacaatgacagctcagaagtttgatgactgcaggtagaattcaaccttttccgtaagtgcctcggaaaagatcacaatggaaccttaaatacttctggtaaaccatagagaatggaggatggctgtgatgaagctgcttagagaatatgactgtactaatggagtttgatttgaattctccatactcttttttgcatcaaaggacaaattaaggcatctttcctcttgccccaaaggcagcaacaacgtactcatatgtacacagagccatgatgtgaggaatgtactcctcattttagacatattctctatgcagtggagataaatctattaaaaggtgctaacagactctcttacaagtgtaagaggaatctactgttgctatgttagtgtgaatgttgaaggtgcaattatcacattgtttattaattgtataacagattattactagaaaggtttttgttgctagtctggaaaactggtgaacacactgtttattatgacaagttttcaaataggtgaagacagcatagaattatgaccagggtggctcaacccacaaatcaactgatctactacttgggagacagtggaaggaaagatagagggaaggaagttcactcacttgaatttgaattgcttctcattctcatcagactctccttgttttgtttgcatatttaattttaaattaaaccaaagaatatgttaattctgaaagagatttttaagagatgctgctctgttttggcatatagtgagtaatggtagagctcttgcatggtaatataccttattggtgctcaacatttgtgggaaattagagggttggtgagattttggtgatgaataaatgccatagagttagagtcactacaagacaatgttctctaagaactgagcctagatgtttgcagtattgaacccataaatgataataagaaacattgttacagatggtgaagggagaaagtggtatttattaatataatgtgtataatcagagtgcctcttatacatactttatagaataaaggaacattttgacagatgaggttatccctcggagtagcgtaatcacacaataacatttagaacttaaattggctacaggacattttattagctttctatccagcatctggtccaaacgatgggactctctgcaactatcattccagaaatggtcttggaggtggccagaatcattgaccatatttttatttggttcaagaagacatcgctctggcatccccagttcagtgaactggtacaatgtggtccctctcaatatttaaaaatataatttgtaacagtgcttaccattcacctcccaaagccaaggaacttgagtgagcttccttggcaagcctcccattgcctttctgcatcaatgtgtttgttaccaaatagcagaaatttcgcttagaaggggaaaacttcagctttccgaaagctagtaaacatgtttcaaagaaaaataaggtcaggagaaaaagaataatgcctacagattatccttcagatgctggctagaatcccctttgacttctagccataagctggccacattggacatcttggtcactgcagaattttaaaaggcaaacttctcagaacagatgtgcacatcttaatttggtgtctgtaagtatcaaccatttcttgatcaagataaggaagcaacactgatactgagagagaggtcatatgtccaatagttgcctttcttctcttaggcagctctgcacttcatgttcagttttttaaaaatagactgtagtatcctttcattggagaatttacaaaaatatcatctacagctcaaaagtcccactaacggcttatatgaacagaaagtactgtgtagcccaggagtttatttagcaagataaatagtggtaatttcttaatcattcccctttcctttgctttaccttctggcagatgcttagctacttctttggctacctcataatttgtatgggaatgaacatgaattagggaacttcaaatagtgcgtagacttttccctacttaccattgggttcaattgatgtagactgttagagcaagtatactcaatcaacttgctgatattttagtagttaacagcttccgagcctatcatgcaatttggagtctgtcaatgaatatagcaatcggtgaagcattactgtacgaagtctgttttcaggctttgggtcaagctggttttataccaaatttcactctacaatgcatattctaatgaagctactttatataaattggagagcttataaaatgcagaacatttctatcctatcctaccaaatatttatccttctctgtcctctattctcttactctcctctctccctttttccttccctttattcccttgaaaaaagagaatctgtgggaaataggcagatatagctttttaaaatataaagtacttgggattttgcattatttttcttaatatctatttactaagtatgtaatttaatatacattaattattttttgaaactcttgttagtgggaagaatatggtaaattttttgttaaataaaatagacccttatgtttagcattttgtttttagagaactattctggtactatcagaacaaatacataaaataacttcccatagagaacaggatatagcaataatagctccttagatactcagtggcttctgactccaatcaaggtcttgttgatattatatagtaaaaataaaaccaaaaataaatattattcaagtggctcttctaagcatgtgaatcatgaagcactgaaatatgtattttaatgatgatcttatttattcccatttttgcccttagttaacatttactggtgctcacctaggattggctattctgagggattgcatagaaaccaagctccacttgctgtccttgggaaggttataactgaatgcagctctttatttggactaaagtgtcaggatatgcattagattctctcctgaaccaaaaacacaacagtcattatctgtgaaccataatttaaaaatctttctagaataacaacagcagactccactcttgtttgtctaaaagagccctactgggtatggatcattctgatgacagatttatacaaaatgattcaaaccagtaacttagtaaaattgaccttcgcaaaacctcactgggggagtgccttgtagagctgtgggtgggactgcacattcttttcctcttagtaaaagataggcccactttattccaagaataacacttagcacataaactcttcttccagctcgttagcagcattagcaccttctgaattccaccctctcagaagaatccacagtgtttgaacaatttgcataaaggtcagctagcatcctgctgccaagccactgcatagcatttgtgataagaaggaccaactctaggctcaatatgaagggatttagttctgtaagcagcaaaaaagcttctttatcaagtcatcttacctctaattcttttccagtgtgccaactccaaagtcaacattaaaaatgtaaatggacctgtgtaaatatcacagagagcttttccttatacatctcaatgctgagagttaaaatattcccaggttaaaatttttttaaagtaccaataatagagctaaatacaatgacatttgcttttaaaaggtggatattttatttctgctttttgaaaatacttatttagtattgacttggaagccaatttggtcctttaataagtaaagaaaataatatgtttaaaaatgtaaatgttttacaaatttgaaactttcataattgtattaatcagaaaacaagcacattgccattctttgaaactcatgtttctagacatgacagcagtaataaaaggatgaaaacaagtgtcttcactaagcgtatggccaataaatgggacccaaacgttcaatctgttcagtttaccaaggttcagaaatacgtaatttagcaggaaactataaataccagtgctatcacagccacacatacacacacacagacataaaataaccaaacatctcatttctaggaaagagataacactaaaggcatcataggtttaactgaaatacgttatatgaagttttacaaaaaggtcaacagaaagctcatttgtgaaaacatactctcatgggagcttctttaacattagttcagaggttaatatatttcctggaggtgttttcctagaattgattgcactattgcatggtaataacatttaattgttaaggaaacattatatataggttcaaattatcccttaatgttgatttctccccttttccatggattttgatactaagaaacaaaatgctttgagattttggtaactattttgattttgataaaacatgttaaaatagaaggacatgatatttttctatagtttccatcaggaagagtacatcagaaacttctccataaggaaagaaaactgactctctcttgaactagtgttgataaaatacactaatgtctttcttaattttattttattaggagaaaaatcagaatattaaatttgcaaacttttgaacagcagtaatagctccttagacactcagtatctttcttccctatctttcaagcacatttaatttctttcccctggtatttgtttgctttgtgttttttcaatattttgtttgctaaagaacaataacaacaacaaagctggtccagccctgacacctacttttgctttttttctttctttcttttaatttgttgaactataggtttctttctgagatgtatttttcattcttccaataatgctctctttttcatttcaaaaccattaccactttcaatatgtaattaacatcctcattcatcagaaagctggtaagtccacacagcatttgtgcagtatcccttctgtgtaaaatgttaaggctttcagatgaaagaaaaaagaacttcctgcaaaagatcaaaagcatcatactaaataaaatgatgacaatatgtgccttgatttttctctcaatggaggttcaacattgacatttaagatgtaaaaaaaattactttgatggtttaattaagaataataagtcaaatatcacatgtatgtagttcttttggatgaccgaataccttaaaatgaactaaataactgaaataaagtgttaaaatgttaaaaaaaaaaaaaaaaaaa

SEQ ID NO: 57283 - DNA, 4233 bp, Homo Sapiens
agcgggcttgcagcgtcggtttccaaggactgtaacgccttcaaccgcccgccgcgatagagtgcccacgaccctgcctcgggaatcccgctctgcaccgccccaccagacccggactcggagccgcgagcggcccgagatgagcagcaatgactcctcccttatggctgggatcatttactatagccaggaaaagtacttccaccatgtgcagcaggctgcagctgtgggcctggaaaaattcagcaatgaccctgtgttgaagttctttaaagcctatggagtcctcaaagaagagcacatccaggatgccatcagtgacctggaaagcatcaggcatcacccagacgtgtccctgtgctccaccatggccctcatttatgctcacaaaagatgtgaaatcattgaccgagaagcaattcaggagcttgagtacagcctgaaggaaatacgcaagacagtcagtgggactgcactgtactatgctggccttttcctctggctcataggccgccatgacaaggccaaagagtacattgaccgcatgctgaagatttctagaggcttcagagaggcctatgtgctcagaggctggggtgacctgacctcagacaagccccacactgcgaagaaagccattgagtacctggaacaaggaattcaggacaccaaagatgtgctggggctgatgggaaaggcaatgtacttcatgatgcagcagaactactcagaggccctggaggtggtgaaccagatcactgtgacttcagggagcttcctgccagccctcgtcctgaagatgcagctgttcttagctcggcaggactgggagcagacagtagaaatgggacacagaatcctagaaaaagatgagagcaatattgatgcctgccaaattctaaccgtgcatgagcttgcaagagaaggaaacatgaccacagtaagttctttgaagactcagaaggctaccaatcacgttagaaatctgattaaggcactagagacaagggaacccgaaaatccaagcctccatcttaaaaaaattattgtggttagccgactgtgtgggagtcaccaggtgattctagggctagtgtgtagtttcatcgagcgcaccttcatggccaccccctcgtatgtccatgtggccacagaactgggctatctcttcatcctgaagaaccaagtgaaagaggccttgctgtggtattcagaagccatgaaactggacaaggatggcatggctggtttgacagggatcatcttgtgtcatatcttagaaggccacctggaggaagctgagtaccggctggaattcctgaaggaggtgcagaagtcccttgggaagtctgaggtgctaattttcctccaagccctcctgatgtccaggaagcacaagggggaggaagagaccacagcgctcctgaaggaggcagtggagcttcacttctccagcatgcaaggcatccctcttggctctgagtactttgaaaagctggacccgtacttcctggtctgcattgctaaggagtacttgctcttctgccccaagcagcccaggttaccaggccagatcgtgtctccacttcttaaacaagtcgccgtgatcttgaatcctgtagtcaaagcagcaccagctctgatcgaccccctgtatttgatggctcaggtcaggtattactcagagctagagaatgcccagagcatcctgcagcgttgcctggagctggaccccgcctccgtggatgcccatctcctcatgtgtcagatctacttggctcagggcaactttggcatgtgcttccactgcttagagctgggtgtcagccacaacttccaggtccgagatcaccccctctaccacctcatcaaggccagggccctcaacaaggctggagactatccagaggccataaagacgctgaaaatggtcatcaaattgccagctctgaagaaggaagaaggcagaaagttcctcaggccctctgtgcagcctagccagcgggcatccatcttattggaactggtggaggccctccggctgaatggggagctacatgaggccaccaaggtcatgcaggacaccatcaatgagttcggtggcacaccagaagagaaccgcatcaccattgccaacgtggacttggtcctgagcaagggcaatgtggacgtggcgctgaacatgctaaggaacatcttgcccaagcagtcctgctatatggaagccagagagaagatggccaacatctacctgcagaccctcagagacaggcgcctctacatcagatgctaccgtgagctctgtgaacatctgcctggcccccacaccagcctgctactgggcgatgccttaatgagcattctggagcccgagaaggccctggaggtctatgatgaggcctatagacagaacccacatgacgcctccctggccagcagaattgggcacgcttatgtgaaggcccaccagtatactgaggcaattgagtattatgaggctgcccagaagattaatggacaggactttctgtgctgcgatctgggcgaactgctcctgaagttaaagaaggtcaataaagcagaaaaagttttgaagcaggcactggaacatgacattgtccaagacatcccatccatgatgaatgatgttaagtgcctgcttttgctggcaaaggtttacaagagccataaaaaagaagctgtgatagaaactttgaacaaggccttggacctccagtctcggatactgaagcgagttccactggagcaaccagaaatgattccctcccagaagcaactggcagcctctatctgcatccaatttgcagagcactacctggcagagaaagagtatgacaaggcggtacagtcttataaggatgtcttctcctacttgccaactgacaataaggtgatgctggagctggcgcagctctacctgctccaggggcacctggacctgtgtgagcagcactgtgccatcctcctgcagactgagcagaaccatgagaccgcttctgtgttgatggctgacctgatgtttagaaaacagaaacatgaagcggccatcaatctttaccaccaagtcttggagaaagcgccagacaattttttggtattgcataaattaatcgatctgctaagaagaagtggaaaacttgaagacattcctgccttctttgaattggccaagaaggtgtctagccgggtgcctttggaaccagggttcaattactgcagaggtatctactgctggcacatagggcagcccaacgaagccttaaagttcctgaacaaggcacgcaaggacagcacttggggccagagcgccatctaccacatggtgcagatctgtctgaatccagacaacgaggttgtgggcggagaggcttttgagaaccagggagctgagagcaactacacagagaagaaggagttggagcagcagggtgtgagcaccgccgagaaactgctgcgtgagttttacccacattcagactccagccagacccagctgcggctgctgcagggcctctgccggctggccaccagggagaaggctaacatggaggctgcgctgggcagcttcatccagatagcgcaggctgagaaggacagcgtccctgccctgctggccttggcacaagcctacgtgttcctgaagcagatccccaaggcgcgtatgcagttgaagcgcctggccaagaccccctgggtgctgagtgaggctgaggacctggagaagagctggctcctgctggctgacatttactgccagggcagcaagttcgacctcgccttagaactgctgcggcgctgtgtgcaatacaacaagtcctgctacaaggcctatgagtacatgggcttcatcatggagaaggagcagtcctacaaggatgcagtcaccaactacaaactggcctggaagtacagtcatcacgccaaccctgccattggtttcaaacttgctttcaactacctgaaggacaagaaatttgtggaggccatcgaaatctgcaacgatgtcctcagggagcaccccgactaccccaagatcagggaggaaattttggaaaaggcccgaaagtccctgaggccctagctggggtcaaggggcctagaccagtagaagccatcaacctactgaagttgtgtggagggatggaaagtgggtcagtggagaagggattcagaaaatgacacattcttccccaaaaaaaaaaaaaaaaaaaa

SEQ ID NO: 57284 - DNA, 7288 bp, Homo Sapiens
catagagccagcgggcgcgggcgggacgggcgccccgcggccggacccagccagggcaccacgctgcccggccctgcgccgccaggcacttctttccggggctcctagggacgccagaaggaagtcaacctctgctgcttctccttggcctgcgttggaccttcctttttttgttgtttttttttgtttttcccctttcttccttttgaattaactggcttcttggctggatgttttcaacttctttcctggctgcgaacttttccccaattgttttccttttacaacagggggagaaagtgctctgtggtccgaggcgagccgtgaagttgcgtgtgcgtggcagtgtgcgtggcaggatgtgcgtgcgtgtgtaacccgagccgcccgatctgtttcgatctgcgccgcggagccctccctcaaggcccgctccacctgctgcggttacgcggcgctcgtgggtgttcgtgcctcggagcagctaaccggcgggtgctgggcgacggtggaggagtatcgtctcgctgctgcccgagtcagggctgagtcacccagctgatgtagacagtggctgccttccgaagagtgcgtgtttgcatgtgtgtgactctgcggctgctcaactcccaacaaaccagaggaccagccacaaacttaaccaacatccccaaacccgagttcacagatgtgggagagctgtagaaccctgagtgtcatcgactgggccttcttatgattgttgttttaagattagctgaagatctctgaaacgctgaattttctgcactgagcgttttgacagaattcattgagagaacagagaacatgacaagtacttctagctcagcactgctccaactactgaagctgattttcaaggctacttaaaaaaatctgcagcgtacattaatggatttctgttgtgtttaaattctccacagattgtattgtaaatattttatgaagtagagcatatgtatatatttatatatacgtgcacatacattagtagcactacctttggaagtctcagctcttgcttttcgggactgaagccagttttgcatgataaaagtggccttgttacgggagataattgtgttctgttgggactttagacaaaactcacctgcaaaaaactgacaggcattaactactggaacttccaaataatgtgtttgctgatcgttttactcttcgcataaatattttaggaagtgtatgagaattttgccttcaggaacttttctaacagccaaagacagaacttaacctctgcaagcaagattcgtggaagatagtctccactttttaatgcactaagcaatcggttgctaggagcccatcctgggtcagaggccgatccgcagaaccagaacgttttcccctcctggactgttagtaacttagtctccctcctcccctaaccacccccgcccccccccaccccccgcagtaataaaggcccctgaacgtgtatgttggtctcccgggagctgcttgctgaagatccgcgcccctgtcgccgtctggtaggagctgtttgcagggtcctaactcaatcggcttgttgtgatgcgtatccccgtagatgccagcacgagccgccgcttcacgccgccttccaccgcgctgagcccaggcaagatgagcgaggcgttgccgctgggcgccccggacgccggcgctgccctggccggcaagctgaggagcggcgaccgcagcatggtggaggtgctggccgaccacccgggcgagctggtgcgcaccgacagccccaacttcctctgctccgtgctgcctacgcactggcgctgcaacaagaccctgcccatcgctttcaaggtggtggccctaggggatgttccagatggcactctggtcactgtgatggctggcaatgatgaaaactactcggctgagctgagaaatgctaccgcagccatgaagaaccaggttgcaagatttaatgacctcaggtttgtcggtcgaagtggaagagggaaaagcttcactctgaccatcactgtcttcacaaacccaccgcaagtcgccacctaccacagagccatcaaaatcacagtggatgggccccgagaacctcgaagacatcggcagaaactagatgatcagaccaagcccgggagcttgtccttttccgagcggctcagtgaactggagcagctgcggcgcacagccatgagggtcagcccacaccacccagcccccacgcccaaccctcgtgcctccctgaaccactccactgcctttaaccctcagcctcagagtcagatgcaggatacaaggcagatccaaccatccccaccgtggtcctacgatcagtcctaccaatacctgggatccattgcctctccttctgtgcacccagcaacgcccatttcacctggacgtgccagcggcatgacaaccctctctgcagaactttccagtcgactctcaacggcacccgacctgacagcgttcagcgacccgcgccagttccccgcgctgccctccatctccgacccccgcatgcactatccaggcgccttcacctactccccgacgccggtcacctcgggcatcggcatcggcatgtcggccatgggctcggccacgcgctaccacacctacctgccgccgccctaccccggctcgtcgcaagcgcagggaggcccgttccaagccagctcgccctcctaccacctgtactacggcgcctcggccggctcctaccagttctccatggtgggcggcgagcgctcgccgccgcgcatcctgccgccctgcaccaacgcctccaccggctccgcgctgctcaaccccagcctcccgaaccagagcgacgtggtggaggccgagggcagccacagcaactcccccaccaacatggcgccctccgcgcgcctggaggaggccgtgtggaggccctactgaggcgccaggcctggcccggctgggccccgcgggccgccgccttcgcctccgggcgcgcgggcctcctgttcgcgacaagcccgccgggatcccgggccctgggcccggccaccgtcctggggccgagggcgcccgacggccaggatctcgctgtaggtcaggcccgcgcagcctcctgcgcccagaagcccacgccgccgccgtctgctggcgccccggccctcgcggaggtgtccgaggcgacgcacctcgagggtgtccgccggccccagcacccaggggacgcgctggaaagcaaacaggaagattcccggagggaaactgtgaatgcttctgatttagcaatgctgtgaataaaaagaaagattttatacccttgacttaactttttaaccaagttgtttattccaaagagtgtggaattttggttggggtggggggagaggagggatgcaactcgccctgtttggcatctaattcttatttttaatttttccgcaccttatcaattgcaaaatgcgtatttgcatttgggtggtttttatttttatatacgtttatataaatatatataaattgagcttgcttctttcttgctttgaccatggaaagaaatatgattcccttttctttaagttttatttaacttttcttttggacttttgggtagttgtttttttttgttttgttttgtttttttgagaaacagctacagctttgggtcatttttaactactgtattcccacaaggaatccccagatatttatgtatcttgatgttcagacatttatgtgttgataattttttaattatttaaatgtacttatattaagaaaaatatcaagtactacattttcttttgttcttgatagtagccaaagttaaatgtatcacattgaagaaggctagaaaaaaagaatgagtaatgtgatcgcttggttatccagaagtattgtttacattaaactccctttcatgttaatcaaacaagtgagtagctcacgcagcaacgtttttaataggatttttagacactgagggtcactccaaggatcagaagtatggaattttctgccaggctcaacaagggtctcatatctaacttcctccttaaaacagagaaggtcaatctagttccagagggttgaggcaggtgccaataattacatctttggagaggatttgatttctgcccagggatttgctcaccccaaggtcatctgataatttcacagatgctgtgtaacagaacacagccaaagtaaactgtgtaggggagccacatttacataggaaccaaatcaatgaatttaggggttacgattatagcaatttaagggccaccagaagcaggcctcgaggagtcaatttgcctctgtgtgcctcagtggagacaagtgggaaaacatggtcccacctgtgcgagaccccctgtcctgtgctgctcactcaacaacatctttgtgttgctttcaccaggctgagaccctaccctatggggtatatgggcttttacctgtgcaccagtgtgacaggaaagattcatgtcactactgtccgtggctacaattcaaaggtatccaatgtcgctgtaaattttatggcactatttttattggaggatttggtcagaatgcagttgttgtacaactcataaatactaactgctgattttgacacatgtgtgctccaaatgatctggtggttatttaacgtacctcttaaaattcgttgaaacgatttcaggtcaactctgaagagtatttgaaagcaggacttcagaacagtgtttgatttttattttataaatttaagcattcaaattaggcaaatctttggctgcaggcagcaaaaacagctggacttatttaaaacaacttgtttttgagttttcttatatatatattgattatttgttttacacacatgcagtagcactttggtaagagttaaagagtaaagcagcttatgttgtcaggtcgttcttatctagagaagagctatagcagatctcggacaaactcagaatatattcactttcatttttgacaggattccctccacaactcagtttcatatattattccgtattacatttttgcagctaaattaccataaaatgtcagcaaatgtaaaaatttaatttctgaaaagcaccattagcccatttcccccaaattaaacgtaaatgttttttttcagcacatgttaccatgtctgacctgcaaaaatgctggagaaaaatgaaggaaaaaattatgtttttcagtttaattctgttaactgaagatattccaactcaaaaccagcctcatgctctgattagataatcttttacattgaacctttactctcaaagccatgtgtggagggggcttgtcactattgtaggctcactggattggtcatttagagtttcacagactcttaccagcatatatagtatttaattgtttcaaaaaaaatcaaactgtagttgttttggcgataggtctcacgcaacacatttttgtatgtgtgtgtgtgtgcgtgtgtgtgtgtgtgtgtgaaaaattgcattcattgacttcaggtagattaaggtatctttttattcattgccctcaggaaagttaaggtatcaatgagacccttaagccaatcatgtaataactgcatgtgtctggtccaggagaagtattgaataagccatttctactgcttactcatgtccctatttatgatttcaacatggatacatatttcagttctttctttttctcactatctgaaaatacatttccctccctctcttccccccaatatctccctttttttctctcttcctctatcttccaaaccccactttctccctcctccttttcctgtgttctcttaagcagatagcacatacccccacccagtaccaaatttcagaacacaagaaggtccagttcttcccccttcacataaaggaacatggtttgtcagcctttctcctgtttatgggtttcttccagcagaacagagacattgccaaccatattggatctgcttgctgtccaaaccagcaaactttcctgggcaaatcacaatcagtgagtaaatagacagcctttctgctgccttgggtttctgtgcagataaacagaaatgctctgattagaaaggaaatgaatggttccactcaaatgtcctgcaatttaggattgcagatttctgccttgaaatacctgtttctttgggacattccgtcctgatgatttttatttttgttggtttttatttttggggggaatgacatgtttgggtcttttatacatgaaaatttgtttgacaataatctcacaaaacatattttacatctgaacaaaatgcctttttgtttaccgtagcgtatacatttgttttgggatttttgtgtgtttgttgggaattttgtttttagccaggtcagtattgatgaggctgatcatttggctctttttttccttccagaagagttgcatcaacaaagttaattgtatttatgtatgtaaatagattttaagcttcattataaaatattgttaatgcctataactttttttcaatttttttgtgtgtgtttctaaggactttttcttaggtttgctaaatactgtagggaaaaaaatgcttctttctactttgtttattttagactttaaaatgagctacttcttattcacttttgtaaacagctaatagcatggttccaattttttttaagttcactttttttgttctaggggaaatgaatgtgcaaaaaaagaaaaagaactgttggttatttgtgttattctggatgtataaaaatcaatggaaaaaaataaactttcaaattgaaatgacggtataacacatctactgaaaaagcaacgggaaatgtggtcctatttaagccagcccccacctagggtctatttgtgtggcagttattgggtttggtcacaaaacatcctgaaaattcgtgcgtgggcttctttctccctggtacaaacgtatggaatgcttcttaaaggggaactgtcaagctggtgtcttcagccagatgacatgagagaatatcccagaaccctctctccaaggtgtttctagatagcacaggagagcaggcactgcactgtccacagtccacggtacacagtcgggtgggccgcctcccctctcctgggagcattcgtcgtgcccagcctgagcagggcagctggactgctgctgttcaggagccaccagagccttcctctctttgtaccacagtttcttctgtaaatccagtgttacaatcagtgtgaatggcaaataaacagtttgacaagtacatacaccataaaaaaaaaaaaaaaa

SEQ ID NO: 57285 - DNA, 6982 bp, Homo Sapiens; identical to SEQ ID NO: 29372

SEQ ID NO: 57286 - DNA, 2373 bp, Homo Sapiens
gggattgggagggcttcttgcaggctgctgggctggggctaagggctgctcagtttccttcagcggggcactgggaagcgccatggcactgcagggcatctcggtcgtggagctgtccggcctggccccgggcccgttctgtgctatggtcctggctgacttcggggcgcgtgtggtacgcgtggaccggcccggctcccgctacgacgtgagccgcttgggccggggcaagcgctcgctagtgctggacctgaagcagccgcggggagccgccgtgctgcggcgtctgtgcaagcggtcggatgtgctgctggagcccttccgccgcggtgtcatggagaaactccagctgggcccagagattctgcagcgggaaaatccaaggcttatttatgccaggctgagtggatttggccagtcaggaagcttctgccggttagctggccacgatatcaactatttggctttgtcaggtggaaggaacagcatatttaagttcttttctgtggaaaactcagaaattgagtctgtgggaagcacctcgaggacagaacatgttggatggtggagcacctttctatacgacttacaggacagcagatggggaattcatggctgttggagcaatagaaccccagttctacgagctgctgatcaaaggacttggactaaagtctgatgaacttcccaatcagatgagcatggatgattggccagaaatgaagaagaagtttgcagatgtatttgcagagaagacgaaggcagagtggtgtcaaatctttgacggcacagatgcctgtgtgactccggttctgacttttgaggaggttgttcatcatgatcacaacaaggaacggggctcgtttatcaccagtgaggagcaggacgtgagcccccgccctgcacctctgctgttaaacaccccagccatcccttctttcaaaagggatcctttcataggagaacacactgaggagatacttgaagaatttggattcagccgcgaagagatttatcagcttaactcagataaaatcattgaaagtaataaggtaaaagctagtctctaacttccaggcccacggctcaagtgaatttgaatactgcatttacagtgtagagtaacacataacattgtatgcatggaaacatggaggaacagtattacagtgtcctaccactctaatcaagaaaagaattacagactctgattctacagtgatgattgaattctaaaaatggttatcattagggcttttgatttataaaactttgggtacttatactaaattatggtagttattctgccttccagtttgcttgatatatttgttgatattaagattcttgacttatattttgaatgggttctagtgaaaaaggaatgatatattcttgaagacatcgatatacatttatttacactcttgattctacaatgtagaaaatgaggaaatgccacaaattgtatggtgataaaagtcacgtgaaacagagtgattggttgcatccaggccttttgtcttggtgttcatgatctccctctaagcacattccaaactttagcaacagttatcacactttgtaatttgcaaagaaaagtttcacctgtattgaatcagaatgccttcaactgaaaaaaacatatccaaaataatgaggaaatgtgttggctcactacgtagagtccagagggacagtcagttttagggttgcctgtatccagtaactcggggcctgtttccccgtgggtctctgggctgtcagctttcctttctccatgtgtttgatttctcctcaggctggtagcaagttctggatcttatacccaacacacagcaacatccagaaataaagatctcaggaccccccagcaagtcgttttgtgtctccttggactgagttaagttacaagcctttcttatacctgtctttgacaaagaagacgggattgtctttacataaaaccagcctgctcctggagcttccctggactcaacttcctaaaggcatgtgaggaaggggtagattccacaatctaatccgggtgccatcagagtagagggagtagagaatggatgttgggtaggccatcaataaggtccattctgcgcagtatctcaactgccgttcaacaatcgcaagaggaaggtggagcaggtttcttcatcttacagttgagaaaacagagactcagaagggcttcttagttcatgtttcccttagcgcctcagtgattttttcatggtggcttaggccaaaagaaatatctaaccattcaatttataaataattaggtccccaacgaattaaatattatgtcctaccaacttattagctgcttgaaaaatataatacacataaataaaaaaa

SEQ ID NO: 57287 - DNA, 3422 bp, Homo Sapiens
aaagagagattgttattattcctcacgatgacccgacagtctctgctttctttttcctttcttccagaaggagatttaaccatagtagaaagaatggagaactattaactgcctttcttctgtgggctgtgattttcagaggggaatgctaagaggtgattttcaatgttgggactcaaaggtgaagacactgaaggacagaatttttggcagaggaaagatcttcttcggtcaccatacttgagttagctctagggaagtggaggtttccatttggaattctatagcttcttccaggtcatagtgtctgccccccaccttccagtatctcctgatatgcagcatgaatgaaaatggcaagtttcctggccttccttctgctcaactttcgtgtctgcctccttttgcttcagctgctcatgcctcactcagctcagttttctgtgcttggaccctctgggcccatcctggccatggtgggtgaagacgctgatctgccctgtcacctgttcccgaccatgagtgcagagaccatggagctgaagtgggtgagttccagcctaaggcaggtggtgaacgtgtatgcagatggaaaggaagtggaagacaggcagagtgcaccgtatcgagggagaacttcgattctgcgggatggcatcactgcagggaaggctgctctccgaatacacaacgtcacagcctctgacagtggaaagtacttgtgttatttccaagatggtgacttctatgaaaaagccctggtggagctgaaggttgcagcactgggttctgatcttcacgttgatgtgaagggttacaaggatggagggatccatctggagtgcaggtccactggctggtacccccaaccccaaatacagtggagcaacaacaagggagagaacatcccgactgtggaagcacctgtggttgcagacggagtgggcctgtatgcagtagcagcatctgtgatcatgagaggcagctctggggagggtgtatcctgtaccatcagaagttccctcctcggcctggaaaagacagccagcatttccatcgcagaccccttcttcaggagcgcccagaggtggatcgccgccctggcagggaccctgcctgtcttgctgctgcttcttgggggagccggttacttcctgtggcaacagcaggaggaaaaaaagactcagttcagaaagaaaaagagagagcaagagttgagagaaatggcatggagcacaatgaagcaagaacaaagcacaagagtgaagctcctggaggaactcagatggagaagtatccagtatgcatctcggggagagagacattcagcctataatgaatggaaaaaggccctcttcaagcctgcggatgtgattctggatccaaaaacagcaaaccccatcctccttgtttctgaggaccagaggagtgtgcagcgtgccaaggagccccaggatctgccagacaaccctgagagatttaattggcattattgtgttctcggctgtgagagcttcatatcagggagacattactgggaggtggaggtaggggacaggaaagagtggcatataggggtgtgcagtaagaatgtgcagagaaaaggctgggtcaaaatgacacctgagaatggattctggactatggggctgactgatgggaataagtatcggactctaactgagcccagaaccaacctgaaacttcctaagccccctaagaaagtgggggtcttcctggactatgagactggagatatctcattctacaatgctgtggatggatcgcatattcatactttcctggacgtctccttctctgaggctctatatcctgttttcagaattttgaccttggagcccacggccctgactatttgtccagcgtgaaaagaagaagagagttcctccaattctgaccgagtgctgatcattccctagagacaccagtaaccccgggcttagctaacgaaagtggggagcctcaggctgaagtaacttttctctgcttctccctgcccagctcagagctgagggcctccccctccacagcaaccaatcacaaccataaagctacaagcacgcactgaagcactttactgatactcattcaattattcatatgacagttgtttgagtttggtaccatcttattttccccttatacagataaggaaactggggtgcagaaaagtgaattgactacaaagtagacatgactagttaacaacacagctgggatctaaacagcaataactaacattaatggagaacttaaaatgctctgagtgctgtgttatgagctttggtggatgtcactcctttaatcctcgcaacaccctgtcgggtagtctcatttagcaagtatggaagttgaggcagggcaacattaagcaacttacataactcatgcagtaatttctgcagttgggagatgttcagcttcagtccccggccctatggccgttcttttccaccctgtttcttcccccataggaagaacccacctgtagccctgaggttcttttcccaggatggctccaggataaggatcactgtaggtggttgtggagttgacacccctgttgactccttcccagctgattgtcagagccttagacccagcacgccttggattagctctgcagagtgtcttggttgagagaataacctcaccgtacccacatgacacgtgatttggaaagagactagaggccacacttgataaatcatggggaacagatgtgttccacccaacaaatgtgataagtgatcatgcagccagagccagccttccttcaatcaaggtttccaggcagagcaaataccctagagattctctgtgatataggaaatttggatgaagggagctagaagaaatacagggatttttttttttttttaagatggagtcttactctgttgctaggctggagtgcagtggtgcgatctcagctccctgcaacctccacctcctgggttcaaacaattctcctgcctcagcctcccgagtactgggaatataggtgcacgccaccacacccaacaaatttttgtacttttagtacagatgagggttcactatgttggccaggatggtctcgatctcttgacctcatgatccacccacctcggtctcccaaagtgctgggattacaggcttgagccaccgggtgaccggcttacagggatatttttaatcccgttatggactctgtctccaggagaggggtctatccacccctgctcattggtggatgttaaaccaatattcctttcaactgctgcctgctagggaaaaactactcctcattatcatcattattattgctctccactgtatcccctctacctggcatgtgcttgtcaagttctagttgttcaataaatttgttaataatgctgaaaaaaaaaaaaaaaaaa

SEQ ID NO: 57288 - DNA, 6452 bp, Homo Sapiens; identical to SEQ ID NO: 32754

SEQ ID NO: 57289 - DNA, 2793 bp, Homo Sapiens
atggagatcagaggggcactcgatctgcgaaaaaggcaagttctaatattccttgttttgctgggattgtctcgggcaggtactgaatctgcacactattctgtggcagaggaaacagaaattggctcttttgtggctaatctagcgagggacctagggctgggggtggaggagctgtcttcacgtgaagcccgggtagtgtctgatgataataaaaagtatttgcaccttgatttgctgactgggaatttgctcctaaatgagaaactagaccgagacgagctgtgtggctccaccgagccctgtgtgctgcattttcaggtggttttggaaaaccctttacagttttttcggtttgagctgtgtgtcaaagacataaatgatcactcccctacatttctagacaaggaaatacttattaaaatatcagaaggtaccactgttggagctacctttctaatggagagtgctcaagatttggatgtcggaagcaacagtctccaaaactacacaattagccccaattctcacttctacattaaaattcccgacagtagtgacagaaagatatacccagagctggtcctagatagagctttagattatgaacaggaagctgaactcagattaacactcacagcagtggatggtggatccccgcccaagtctgggacaactttggttctcatcaaggtgttggacatcaatgataatgcccctgagtttcctcagagtctctatgaggtgcaagtccccgaggacagaccccttggctcctggattgccaccatctcagctaaggatctggatgcaggaaactatggaaaaatatcttacacatttttccatgcatcagaagatattcgtaaaacatttgaaattaatccaatatctggggaagttaatttgagatcacccctggattttgaagtaatacagtcctacactataaatattcaggcaacagatggtgggggtctttcaggaaaatgcacccttctagttaaagttatggatataaacgacaacccaccagaagtgaccatatcgtcgattacaaagagaattccagagaatgcctcagagaccctagtagctctttttagtatcctagaccaagactctggagacaatgggaggatgatttgctctattcaagataacctcccttttttcctgaaaccgaccttcaagaactttttcactctagtttctgaaaaagcactggacagagagagccaagccgagtacaacatcacgatcaccgtcacagacttggggacacccaggctgaaaaccgagtacaacataaccgtgctgctctctgacgtcaatgacaacgcccccaccttcacccaaacctcctacaccctgttcgtccgcgagaacaacagccccgccctgcacatcggcagcgtcagcgccacagacagagactcaggcaccaacgcccaggtcaactactcgctgctgccgccccaggaccggcacctgcccctcgcctccttggtctccatcaacgcggacaatggccacctgtttgccctcaggtcgctggactacgaggccctacaggagttcgagtttcgcgtgggcgccacagaccgcgggtccccggcgttgagcagcgaggcgctggtgcgcgtgctggtgctggacgccaacgacaactcgcccttcgtgctgtacccgctgcagaacggctccgcgccctgcaccgagctggtgccccgggcggccgagccgggctacctggtgaccaaggtggtggcggtggacggcgactcgggccagaacgcctggctgtcgtaccagctgctcaaggccacggagcccgggctgttcggcgtgtgggcgcacaatggcgaggtgcgcaccgccaggctgctgagcgagcgcgacgcggccaagcacaggctggtggtgctggtcaaggacaatggcgagcctcctcgctcggccaccgccacgctgcacgtgctcctggtggacggcttctcccagccctacctgccgctccctgaggcggccccggcccaggcccaggccgactccctcaccgtctacctggtggtggcattggcctcggtgtcgtcgctcttcctcttctcggtgctcctgttcgtggcggtgcggctgtgcaggaggagcagggcggcctcggtgggtcgctgctcggtgcccgagggtccctttccagggcatctggtggacgtgagcggcaccgggaccctgtcccagagctaccaatacgaggtgtgtctgacaggaggttccgggacaaatgagttcaaatttctgaagccgattatccccaattttcaagttcatgacactggtaggaatatgggggaaatcgagaactttcgaaatagctttggacttaacattcaataaaacaatttattttaaatgtctaatttttggttattcttggcaagctgatggtactttttgcataatcttttgtggattcttggttgtactgtagttgcatgcatgattatagctcttgtttttctcacagtttctttaaaaatctttattagtggctataatgacgtggaaatgtaatctgtgttttctggtttttcatttatttggccaaaatgttatattaatggagttattgctatttttgctgtgataatggtattatgcaagaccatattctcaattatttggatatgcaaactaaagtattaagagctaatgtcattatatatgtaacttaaatctagacaccatcaaagcataaaataaaaataaaaagcgttgctgaaaaaaaaaaaa

SEQ ID NO: 57290 - DNA, 2206 bp, Homo Sapiens
ctagtctttcagccttcaggctgtttttggcttgaagctctcttggcctcctagtttctacctaatcatgtccctggtggaggccatcagcctctggaatgaaggggtgctggcagcggacaagaaggactggaagggagccctggatgccttcagtgccgtccaggacccccactcccggatttgcttcaacattggctgcatgtacactatcctgaagaacatgactgaagcagagaaggcctttaccagaagcattaaccgagacaagcacttggcagtggcttacttccaacgagggatgctctactaccagacagagaaatatgatttggctatcaaagaccttaaagaagccttgattcagcttcgagggaaccagctgatagactataagatcctggggctccagttcaagctgtttgcctgtgaggtgttatataacattgctttcatgtatgccaagaaggaggaatggaaaaaagctgaagaacagttagcattggccacgagcatgaagtctgagcccagacattccaaaatcgacaaggcgatggagtgtgtctggaagcagaagctatatgagccagtggtgatccctgtgggcaagctgtttcgaccaaatgagagacaagtggctcagctggccaagaaggattacctaggcaaggcgacggtcgtggcatctgtggtggatcaagacagtttctctgggtttgcccctctgcaaccacaggcagctgagcctccacccagaccgaaaaccccagagatcttcagggctctggaaggggaggctcaccgtgtgctatttgggtttgtgcctgagacaaaagaagagctccaggtcatgccagggaacattgtctttgtcttgaagaagggcaatgataactgggccacggtcatgttcaacgggcagaaggggcttgttccctgcaactaccttgaaccagttgagttgcggatccaccctcagcagcagccccaggaggaaagctctccgcagtccgacatcccagctcctcctagttccaaagcccctggaaaaccccagctgtcaccaggccagaaacaaaaagaagagcctaaggaagtgaagctcagtgttcccatgccctacacactcaaggtgcactacaagtacacggtagtcatgaagactcagcccgggctcccctacagccaggtccgggacatggtgtctaagaaactggagctccggctggaacacactaagctgagctatcggcctcgggacagcaatgagctggtgcccctttcagaagacagcatgaaggatgcctggggccaggtgaaaaactactgcctgactctgtggtgtgagaacacagtgggtgaccaaggctttccagatgaacccaaggaaagtgaaaaagctgatgctaataaccagacaacagaacctcagcttaagaaaggcagccaagtggaggcactcttcagttatgaggctacccaaccagaggacctggagtttcaggaaggggatataatcctggtgttatcaaaggtgaatgaagaatggctggaaggggagtgcaaagggaaggtgggcattttccccaaagtttttgttgaagactgcgcaactacagatttggaaagcactcggagagaagtctaggatgtttcacaaactacaaagctgaagaaaatgaagccctattacttgtttgtaagatttagcacccttctgctgtatactgtactgagacattacagtttggaagtgttaactatttattccctgttaaaatttaacctactagacaatgatgtgagtacccaggatgatttcctggggcacagtgggtgaggagatggggacaggtgaatggaggagttaggggagaggaaaagtggatggaagtgtctggaaagggcacgagagagtcttccaggtactgatcctgtttcttgctctgagtgctagctagccagctgtgttcacactgtaaacattcatcaagctgtacatttggtgcacttttctgtgtcataccacaataaaaaaaaacctatcatcatcttacaaaaacaagacacccaagtccaggcccaaggagtaagtacaaatattcctgtttctgaaccattactgtaattggctcttaaggcttgaagtaaccttataggttactcataaggcatatacaaataaacttgtttgttttcttttttc

SEQ ID NO: 57291 - DNA, 2788 bp, Homo Sapiens; identical to SEQ ID NO: 29504

SEQ ID NO: 57292 - DNA, 1537 bp, Homo Sapiens
gaggaagaagaatctgtatatctgtatatattggctagcaaatgtgccctgctctctcccctcttaaaaatagcagcaacccatctttgcaaagaagcttgcctatagagcaggcactctgtgaatggactgtgcttttacgaccctacagggtatcaagatactgtgcagctcgccaacaaggattaattgcaaggactggtagatcgaatttactgaagacttggagcttgcttctgagaacaaacgcaaaaggacagtaaactgtggaccttgaagttagcagcgtgggcttcctctaatattacaccgtaaaaggcattgatcaccataagaaggaacatttgtgaaggtactccagtgccagaaagaggcacaaagcagacattcgtagagaaacatggatgaaacaggaaatctgacagtatcttctgccacatgccatgacactattgatgacttccgcaatcaagtgtattccaccttgtactctatgatctctgttgtaggcttctttggcaatggctttgtgctctatgtcctcataaaaacctatcacaagaagtcagccttccaagtatacatgattaatttagcagtagcagatctactttgtgtgtgcacactgcctctccgtgtggtctattatgttcacaaaggcatttggctctttggtgacttcttgtgccgcctcagcacctatgctttgtatgtcaacctctattgtagcatcttctttatgacagccatgagctttttccggtgcattgcaattgtttttccagtccagaacattaatttggttacacagaaaaaagccaggtttgtgtgtgtaggtatttggatttttgtgattttgaccagttctccatttctaatggccaaaccacaaaaagatgagaaaaataataccaagtgctttgagcccccacaagacaatcaaactaaaaatcatgttttggtcttgcattatgtgtcattgtttgttggctttatcatcccttttgttattataattgtctgttacacaatgatcattttgaccttactaaaaaaatcaatgaaaaaaaatctgtcaagtcataaaaaggctataggaatgatcatggtcgtgaccgctgcctttttagtcagtttcatgccatatcatattcaacgtaccattcaccttcattttttacacaatgaaactaaaccctgtgattctgtccttagaatgcagaagtccgtggtcataaccttgtctctggctgcatccaattgttgctttgaccctctcctatatttcttttctgggggtaactttaggaaaaggctgtctacattcagaaagcattctttgtccagcgtgacttatgtacccagaaagaaggcctctttgccagaaaaaggagaagaaatatgtaaagtatagtttaaacccatttccagtccaaaccaatgaaaatagtttcccaaataagtattttgtcaaatcatttacaaaaaaaataaaaattttacttaatattttaaaaaaaaaaaaaaaaaaaaaaaa

SEQ ID NO: 57293 - DNA, 2485 bp, Homo Sapiens; identical to SEQ ID NO: 29085

SEQ ID NO: 57294 - DNA, 1677 bp, Homo Sapiens
gtcctccacttcctggggaggtagctgcagaataaaaccagcagagactccttttctcctaaccgtcccggccaccgctgcctcagcctctgcctcccagcctctttctgagggaaaggacaagatgaagtggaaggcgcttttcaccgcggccatcctgcaggcacagttgccgattacagaggcacagagctttggcctgctggatcccaaactctgctacctgctggatggaatcctcttcatctatggtgtcattctcactgccttgttcctgagagtgaagttcagcaggagcgcagacgcccccgcgtaccagcagggccagaaccagctctataacgagctcaatctaggacgaagagaggagtacgatgttttggacaagagacgtggccgggaccctgagatggggggaaagccgcagagaaggaagaaccctcaggaaggcctgtacaatgaactgcagaaagataagatggcggaggcctacagtgagattgggatgaaaggcgagcgccggaggggcaaggggcacgatggcctttaccagggtctcagtacagccaccaaggacacctacgacgcccttcacatgcaggccctgccccctcgctaacagccaggggatttcaccactcaaaggccagacctgcagacgcccagattatgagacacaggatgaagcatttacaacccggttcactcttctcagccactgaagtattcccctttatgtacaggatgctttggttatatttagctccaaaccttcacacacagactgttgtccctgcactctttaagggagtgtactcccagggcttacggccctggccttgggccctctggtttgccggtggtgcaggtagacctgtctcctggcggttcctcgttctccctgggaggcgggcgcactgcctctcacagctgagttgttgagtctgttttgtaaagtccccagagaaagcgcagatgctagcacatgccctaatgtctgtatcactctgtgtctgagtggcttcactcctgctgtaaatttggcttctgttgtcaccttcacctcctttcaaggtaactgtactgggccatgttgtgcctccctggtgagagggccgggcagaggggcagatggaaaggagcctaggccaggtgcaaccagggagctgcaggggcatgggaaggtgggcgggcaggggagggtcagccagggcctgcgagggcagcgggagcctccctgcctcaggcctctgtgccgcaccattgaactgtaccatgtgctacaggggccagaagatgaacagactgaccttgatgagctgtgcacaaagtggcataaaaaacatgtggttacacagtgtgaataaagtgctgcggagcaagaggaggccgttgattcacttcacgctttcagcgaatgacaaaatcatctttgtgaaggcctcgcaggaagacccaacacatgggacctataactgcccagcggacagtggcaggacaggaaaaacccgtcaatgtactaggatactgctgcgtcattacagggcacaggccatggatggaaaacgctctctgctctgctttttttctactgttttaatttatactggcatgctaaagccttcctattttgcataataaatgcttcagtgaaaaaaaaaaaaaaaaaaaaaaaaa

SEQ ID NO: 57295 - DNA, 5360 bp, Homo Sapiens
gggagagaggagttgggctgtgccggaggccgaggaccgagagggctcaggtgacccctggaaagcctgggtggctggaaaggagcctagcgcctgcatgaaaggaagaacctgctgggaagtacctgagctcgagctgtgggttccgccgcccttcccctgcgtggtggcttggtggccgcgtctgcgcctcagccctgagaatccggatggcggtgaggtggacttgggcaggcaagagctgcctgctgctggcgtttttaacagtggcctatatcttcgtggagctcttggtctctacttttcatgcctccgcaggagccggccgtgccagggagctggggtcaagaaggctctcagacctccagaaaaatacggaggatttgtctcgaccgctttataagaagccccctgcagattcccgtgcacttggggagtgggggaaagccagcaaactccagctcaacgaggatgaactgaagcagcaagaagaactcattgagagatacgccatcaatatttacctcagtgacaggatttccctgcatcgacacatagaggataaaagaatgtatgagtgtaagtcccagaagttcaactataggacacttcctaccacctctgttatcattgctttctataacgaagcctggtcgactttgctccgtaccattcacagtgttttagaaacttctcctgcagttcttttgaaagagatcatcttggtggatgacttgagtgacagagtttatttgaagacacaacttgaaacttacatcagcaatcttgatagagtacgcttgattaggaccaataagcgagaggggctggttagggcccgtctgattggggccactttcgccactggggacgtcctcactttcctggattgtcactgtgagtgtaattccggttggctggaaccgcttttggaaaggattgggagagatgaaacagcagttgtgtgtcctgttatagacacaattgattggaatacttttgaattctatatgcagataggggagcccatgattggtgggtttgactggcgtttaacatttcagtggcattctgtccccaaacaggaaagggacaggcggatatcaagaattgaccccatcagatcacctaccatggctggaggactgtttgctgtcagcaagaaatattttcagtaccttggaacgtatgacacaggaatggaagtgtggggaggtgaaaaccttgagctgtcttttagggtgtggcagtgtggtggcaaattggagatccacccgtgttcccacgtgggccatgtgttccccaagcgggcaccatatgctcgccccaatttcctacagaatactgctcgggcagcagaagtttggatggatgaatacaaagagcacttctacaatagaaaccctccagcaagaaaagaagcttatggtgatatttctgaaagaaaattactacgagagcggttgagatgcaagagctttgactggtatttgaaaaacgtttttcctaatttacatgttccagaggatagaccaggctggcatggggctattcgcagtagagggatctcgtctgaatgtttagattataattctcctgacaacaaccccacaggtgctaacctttcactgtttggatgccatggtcaaggaggcaatcaattctttgaatatacttcaaacaaagaaataaggtttaattctgtgacagagttatgtgcagaggtacctgagcaaaaaaattatgtgggaatgcaaaattgtcccaaagatgggttccctgtaccagcaaacattatttggcattttaaagaagatggaactatttttcacccacactcaggactgtgtcttagtgcttatcggacaccggagggccgacctgatgtacaaatgagaacttgtgatgctctagataaaaatcaaatttggagttttgagaaatagagcacaacagcactttcgtcatgagctgacagtagtgtcaagaaagtcaaagagccttaagagcctcagtgaagattgtattttattttatcaaaagccacctagcagtcatctgtggagcactggaaagctggggttcattttggtatatcacactgaaactgggtacccagagtgctgctgtttaatatttcacaatgccttacttattggttgttttatataagagttttgtcaatatggtctcttcttaaaagaagttgactatgaattgaaacacacaaaacatttaagtgccagacttaatattaaagaatgtaaaggtccaagtaaaatgaggtatgatttatgttgatgtgtaagttcaccgcacatcccactttttaacaaaactcatgaatgtgcagtttgagccattgctattttgattacatagaatttgtatttcttttttagccagcacattaaattttagattttattttttaatctaatttttttctaatcaaaaagaaaattgagcttaaggcaaaaggcctggttttagagatatgtgtaattggaagagggcatttgtttgagtgtgagtttggaggcctttttaacatgcagacatacccatatttaaatgaaatggggagatatttacattccgtactttgtaaacttgagctattggacttcactgatgtatatattaatacctcagattcctctgattttgtaagctgtcttctctgtgaacgtgtttgtgtgtgtagggcattttctgattgcacttccttaagttatgaatgtactagaaagggactcatccagaatactatgcctccctttgttaatgcttaatcatttaaagtaaacacaattgaagcctctctgaagttaaacccaactatgtttattaaaatgtgtgaaactgaaagtgggctaggttctaccaaggctgtggaactctcctacgagttctgctgatcaggaaatttaagaatttatcttaaaaatgcaaggaaaaaagactgccttggcaattgtgaatggtgctttcaatctcctagcaccgagcctggcacttaggcagctttcagtaagtgggtgaatgaatgactgaatgaatgaatgaatggctcagctgaggaatgtaactttggtcaagttattatgatgtgtttgggcttagttttctcattggtaaaatgtgggtgctggattggatcttaaagatcccttccagctctgaaatgctgattgtacagtatattcttcccagattgactcactgtgcaatctttacaatactttttatcttttcacttttgacataggtaatgttgttgagcagttgagcaatgttcagtccagttgtgaagctggagaagagaaatgggttttaaaaattaagtgaggggaggccgggtgcggtggctcacgcatgtaatcccagcactttgggaggccaaggcaggtggatcacgaggtcaggagatccagaccatcctggctaacatggtgaaacctcgtctctactaaaaatacaaaaaattagccagctgtggtggcgggcgcctgtagtcccagctactcaggaggctgaggcaggagaatggcgtgaacctgtgaggcagagcttacagtgagccgagatcgtgccactgcactccagcctgggcgacagagcaagactctgtctcaaaaaaaaaaaataataataaaataagtgagctgaactcacctgaagtggtttacttctgtgggttaagaagttctagtcagtgttcatagtcgtttcgttttgataattgttgaaccaattttgtttttaaaacctttagactctgaaagtaatattttgactaagaatgtaaatatttccaaactaaattactcgggaagtaaacgctttttttaaaagtatttttactggttttataccaatattatatgcagaaatcacaggatgaatttagaattaaatctcaattagttcactttggcctagatttatgaaaaatgcatgcctcgtaaagagtccactgtattcacgagtaaagttgcttttagtgttcacttgatgacttggagagtaggaattttgcaaaatctgaatttaaggaaattctttaggataaccatttcaaaaaataaaattgctatgcaatcttgaatattttctcttttgcctcgtaaaatgaaaatgcattcacagtttctgtaaattatttagcagccttaaagtttatcaaaaaattgtccagattccacgtgcagcatgcttggccctgcatttaatttaagaaggattaataataatgctctgaatttttcgaaagggattctcctaaacccacccacttctcttgcccaggctgctttttaaaaatatttttttattttttacttatttttaaattttctctttttatttatttttggttttcttgttagccacctgttatatgggagaacgaaaattgttatattttgaaagtacttattacattatttttattttagtatcttgatgctcctgtcaaaagggaaatgaggcttttaaaaataaagtaccttaattctttattgactttttgccctaaattgctaggtgtgacccagcaatcttttaggaagagattttacagtggtgctttatttatatcaataatccagtatagttaggctgttcattcctcataatagagtacataacagaaaagtgggactttcacattttcatatttaggcacgttccaatttaattccaaaaatactctgtaattctacatctaaaaaaaccgattccctaattcgaatttattggtaccaaagctctctttggctatagacaattaagagttgaccttttaagttaatgtatatgcttaaaaacagttttaggaaaatatttggtagacaaagagtttcaactttaaatgttcactatgtcatttagtgtccaactttacggataggttgactatctaaataggcatttttagtcattaaaaaaaatctagtcaccaggaggatccctataactcaaaataacttgtttgtaaaagaaaatttgtttacttacccattagtaagttcctgcatattcattataagatggcaaatcaaacttttctaggatgaagacagcttatttttaagttgtatagtcttagttggtttagggtctcaattttaattaataaaatacttggtttttatttgcttgtccttttgaattcctgttttaataattttaaaatgagcacaaagaacgttgaagttcagattaatctcttctgaatgatgtttttttcctctgtgatgagttgtttctgacttttttccttttgtatttgtaatgttgattaagatgtaaaataaaaagtgtgcctgattatttttgcaaaaaaaaaaaaaaaa

SEQ ID NO: 57296 - DNA, 1640 bp, Homo Sapiens; identical to SEQ ID NO: 29786

SEQ ID NO: 57297 - DNA, 7207 bp, Homo Sapiens; identical to SEQ ID NO: 30393

SEQ ID NO: 57298 - DNA, 10257 bp, Homo Sapiens; identical to SEQ ID NO: 31009

SEQ ID NO: 57299 - DNA, 1985 bp, Homo Sapiens
gcaccgcccccgcccgcaagaaagatggcagtggcctgatccgggcccgttggcggcgtcactgacgcttcgctccggtcctcggatcccgagcgcggggaggcagaccgactgtgagctgcttgtccccatcctgcggccgtcctggggacacagagccctccgtggtgcccggggattggattggagccaggacctcacttcctcctctgcccctgcccctgcccctcccagcacctggcccacaccctgcagcccgccccatggtctggccctgggtggcgatggcgtccaggtggggtcccctcattggcctggctccgtgctgcctctggctcctgggggcagtccttctgatggacgcgtctgcacggcctgccaaccactcgtccactcgagagagagtagccaacagggaggagaatgagatcctgcccccagaccacctgaacggggtgaagctggagatggacgggcacctcaatcgcggcttccaccaggaggtcttcctaggcaaggacctgggtggctttgatgaggacgcggagccgcggcggagccggaggaagctgatggtcatcttttccaaggtggatgtgaacactgaccggaagatcagtgccaaggagatgcagcgctggatcatggagaagacggccgagcacttccaggaggccatggaggagagcaagacacacttccgcgccgtggaccctgacggggacggtcacgtgtcttgggacgagtataaggtgaagtttttggcgagtaaaggccatagcgagaaggaggttgccgacgccatcaggctcaacgaggaactcaaagtggacgaggaaacacaggaagtcctggagaacctgaaggaccgctggtaccaggcggacagcccccctgcagacctgctgctgacggaggaggagttcctgtcgttcctccaccccgagcacagccggggaatgctcaggttcatggtgaaggagatcgtccgggacctggaccaggacggtgacaagcagctctctgtgcccgagttcatctccctgcccgtgggcaccgtggagaaccagcagggccaggacattgacgacaactgggtgaaagacagaaaaaaggagtttgaggagctcattgactccaaccacgacggcatcgtgaccgccgaggagctggagagctacatggaccccatgaacgagtacaacgcgctgaacgaggccaagcagatgatcgccgtcgccgacgagaaccagaaccaccacctggagcccgaggaggtgctcaagtacagcgagttcttcacgggcagcaagctggtggactacgcgcgcagcgtgcacgaggagttttgagcgcccggccgcgccccgcgccgccccccacgcaccaccggggcggcctcgcgggtgactccgggctccgtggctgtcccggaccccacctcttccctgccgcccgccaccggccgaccgaccgcggctgccccagttgatgagcggcgtgtcccctctgcagcgcgcaccccggcggggctttggctgtgacgcggtcggggcgcggggctgggctgtggccccgcggcgccgcctcctccctggtccctcgaaatcgtggcatctcacttctgagaacgaaatctcgcttcagtcactctgccgaaggcgctgacggcatcgcggccggaacctctgggcccggcccctcccagggccgccgctccgtgggaaaaaacagctcctccatttccttgaaaactgaacgattattaaaaatagattaaacttcgctggaaatgagtagccaggaagttcaggggagggtgccgggtccttcccgggcctggcgtgtcggagccacccaggtcccgcagctgccgctgagaaaatgcaaatatttgttgtgacaagaatcacatacatttactttaaatatagttgccttttttggtcagcttcaaaaaaaaaaaaaaaaaaaaaaaaaaaaaa

SEQ ID NO: 57300 - DNA, 3198 bp, Homo Sapiens
ggaccccgcaggtgcttgggggcgtagcctggagtgagggtttggctggtgtagcttggagtgaggccccctggcgtggagtcttgaggcctgctgagggcgtgagctggcatgaggcgaagagagggccatggcaccgactccgagatgggtcaaggacccgtacgggagtcgcaatcctcagaccctcccgcgctccagttccggataagcgagtataagccgctgaacatggcgggagtggagcagcccccgagccccgagctgcggcaggaaggcgtgaccgaatacgaagatggcggggccccggcgggagatggcgaggcgggcccccaacaggcggaggaccacccccagaatcctccagaagatcccaatcaggaccccccagaggatgatagcacctgtcagtgccaggcgtgcgggcctcaccaagccgcgggtccagatcttggttcctctaatgatggctgccctcagctgttccaggagcggtcagtcatagtggagaactcctcaggctctaccagcgcttctgagctcctcaaacccatgaagaagaggaagcgcagggaataccagagcccatcagaggaggagtcggagccagaggccatggagaagcaagaagaaggaaaggacccagagggacaacccactgctagcaccccagagagtgaggagtggagcagcagccagcctgcaacaggtgagaagaaggaatgctggtcgtgggagtcctacctagaggagcagaaggccattactgctccagtcagcctcttccaggactcccaggcagtcactcacaacaagaatggcttcaaactgggcatgaagttggaaggcattgaccctcaacacccgtccatgtacttcatcctcaccgtggctgaggtatgtggctatcgcctacgcctgcactttgatgggtattctgagtgccatgacttctgggtcaatgccaactcccctgacattcaccctgctggctggttcgagaagacgggccacaagctgcagcctcccaaaggttacaaggaggaggagttcagctggagccagtacctgcgcagcacaagagctcaggctgcccccaagcacctgtttgtgagccagagccacagtcccccacccctgggcttccaggtgggcatgaagctggaggctgttgaccgcatgaacccgtcccttgtctgcgtggccagtgtgaccgatgtggtggacagccgcttcctggtgcactttgacaactgggatgatacttatgactactggtgtgatcccagcagcccctacatccacccagtgggctggtgccagaagcaaggaaagcccctcacccctccacaagactacccagaccctgataacttctgttgggagaaatatctggaagaaactggggcctctgctgtccccacctgggccttcaaggtgcgaccccctcacagcttcctggtcaatatgaagctggaggctgtggaccgcaggaacccagccctgattcgcgtggccagcgtggaggatgtggaggaccatcggataaagatccactttgatggctggagtcatggctatgatttctggatcgacgctgaccacccagacatccaccctgccggctggtgctccaagacaggacatcccctgcagcctcctctcggacccagagagcccagctctgcctcccctgggggctgtccccctctcagctataggagcctgccccacactaggacctccaaatacagctttcaccaccggaagtgccccactcctggttgcgacggctctggccatgtcacaggcaagttcacagctcaccattgcctctcaggctgcccactggctgagaggaaccagagccggctgaaagcggagctgtctgacccggaggcctcagcccgcaagaagaacctctcaggcttctccccaaggaagaagcctcgccatcacggccgaattggacgccctccgaagtatcgaaagattccgcaggaagatttccagaccctcacgcccgatgtcgtgcaccagtccctcttcatgtcagccctgtcggcccaccctgaccgctcactctcagtgtgctgggagcagcactgcaagctcctgccaggagtagcgggcatctcagcctcgacagtcgccaagtggaccatcgatgaggtcttcggctttgttcagaccctgacaggttgtgaggaccaagcacgcctcttcaaagacgaggcaagaatagtcagagtgacccatgtatctgggaagactctagtctggactgtggcccagcttggggaccttgtgtgctcagatcatcttcaggaaggaaaaggcatcctggagacaggagtccattcactcctctgctctctacccactcatttgcttgccaaacttagctttgccagtgatagtcaatattaaagtgtacttttttcccctttaatccaatatagttgataattaaagtgtattttgaatgacacagatattgtgatttactgcaaggatcctaacacacacttaaaatcaagagccaaggagtagtgagttgtagataaaaaaagaatgtcagctttggagacagtctgggtttaaatcccagttctgtcaatttgagctgtttactgtctctgagcctacatcttcttgtctgtaaaatggagataaaatgggtttaatgaggtctaccttgcagagccattgtgagcattggaaatgatgaatgaatcataccagaacgtctagtataattacagtcatgcattgcttaacgatggggatacattcttagaaatgtgtcactaggcaattctgtcattgtgtaaacattataggatgtacttacacaaacctagatgttatatgtatttttatttacatgtatattttcacatgaaataccaaatgtcacagcattattactgaatgtcagtcatttcccctacttgatctgcaatgccaatatcaagggccatgtatcaggtttctgtatatgttccactataatcttatgggaccatggttttaaatgtggaatcattgacagaaatgtctttatgtagcatatggctgtgtatcactagtatataatagagcaatattatggaggaatatgtagatccaatcactttacctatacaaaatgactgctatggtgggaacacaataaacaccagttttgacttttaa

SEQ ID NO: 57301 - DNA, 4071 bp, Homo Sapiens
ccacgcgtccgcgggttcccagaaagtagcttgatgagtgtccaaagtagcagtggaagtttggaggggccgccatcttggtcccagctctccacgtctccaaccccgggctcggcggcggcggccaggtccctgctgaatcacacgccgccatccgggaggcccagggaaggtgcaatggatgagcttcatagtctggatccaagaaggcaagagttattggaagctagatttactggagttgcaagtgggagcactggaagtacgggcagttgcagtgttggagctaaagcctcaacaaataacgaaagctctaatcacagttttggaagcttgggatctttaagtgacaaagaatcagagacaccggagaagaaacaatcggaatcatccaggggaagaaagagaaaagcagaaaaccagaatgaaagtagtcagggaaaaagtattgggggacgtggccacaaaattagcgactattttgaataccagggtggaaatggctcaagtccagtaagaggcatacctcctgcaatccgttctcctcaaaattcacattcacattccactccttcctcatctgttcgaccgaatagcccttctcctactgcattagcatttggggaccaccctattgtacaaccaaagcaattatcctttaaaattattcagactgatctcacaatgctgaaattagcagcattagaaagtaataaaatccaggacctggaaaagaaggagggacgtatagatgatttgctcagggctaactgtgatctcagacggcaaatagatgaacaacaaaaattacttgaaaaatacaaagaacgattaaataagtgcatatcaatgagcaagaaacttcttattgaaaagagtacacaagaaaagctgtcaagcagagagaagagtatgcaagatcgattacgccttgggcactttacaacagttagacatggcgcttcatttactgaacaatggacagatggttttgcatttcagaatcttgtgaagcaacaagaatgggtgaatcagcaaagggaagatattgaaaggcaaaggaaacttctagccaaacgcaaacctcccacagctaataattctcaggcaccctctaccaattctgaaccaaaacaaaggaaaaacaaagcagtcaatggagcagagaatgatccctttgttagaccaaatttaccacaactgttgactttggcagaatatcatgaacaggaagaaattttcaaacttagactaggacatctcaaaaaggaagaggcagaaatccaggcagaacttgaacgtttggaaagagtcagaaatcttcacatacgtgagctgaaaagaataaacaatgaagataattcacagttcaaagatcacccaacattaaatgaaagatatttattacttcatctgcttggtagaggtggctttagtgaagtgtataaggcttttgacctttatgaacaaagatatgctgctgtgaagatacatcagcttaataaaagctggagagatgagaagaaagaaaactaccacaaacatgcctgcagagagtatagaatacacaaagaactggatcaccccagaatagttaaactctatgattatttctccttggatacagatacgttttgtacagtgttagaatactgtgaaggcaatgacttggatttctatctgaagcaacacaagttaatgtcagagaaagaagctcggtctattgtaatgcagattgtaaatgcactaagatatctcaatgagatcaaaccccctattatacattatgatcttaagccaggaaacatcctactggtagatggaacagcatgtggtgaaatcaaaatcactgattttggtctgtccaagattatggatgatgatagctatggtgtagatggaatggatctaacttcccagggggcaggcacttactggtatttacctcctgagtgttttgtagttggaaaagagccaccaaagatttccaacaaggttgatgtatggtcggttggagtcatcttctttcagtgtctttatggtagaaagccatttggtcacaatcaatctcaacaagacattcttcaagaaaatacaatattaaaagccacagaagtccagttccctgtaaaaccggttgtaagcagtgaagccaaggcatttataagacgctgtttggcatatcgaaaagaagatcgatttgatgtgcaccagctggcaaatgacccataccttctcccacacatgagaagatcaaattcttcaggaaacctacacatggctgggctgacagcatcccctacacccccttcttcaagcataattacttactgactttcctccaagattggcatgatatctttgaatttgcttccagatgcacacttaagtttgagagcatttgagtgtttgttttctttttctttttttttttttttttttttacacaagacgtggttaagaactgtttgtgaactgaagttcctcatagtgtcatttgtatgagagaggatcatggacaatgaataaatgcacacttctgactataattttgagcagtgaaggaaggatgactgcctgttacacagaaacaggaataccatgttaagatagaggaaaaaaattttgtttatttgggggaacactgtaaataacgtttataatacttaaatacatttggttgttactagagagttctaatatgaagggtagtttttcattatttaaaaacacatggaaaaatatgagacatatttctaacatacgaactatagtgcctggatacattcttcagcatttggcagttaatctgctgaaaccaaagtaagaactgaatgacagtgacagttgtgttttatagtaatagaatgtgagagttagaatctttggacaaagttaggctttgtcatttgcctattcagacttttaccaagttgtacctcgagatcacatgtccgttttctttcactggttatattaaagggagagctattatttctaaatactttacacctttgacaaaatgagctgcttgtgttgaaatcagttgaattcactaaattataatattgccagtgttttcaacacgttagaattgataacaggtatttttcttttgttaccaggccttgttcatcaaaacaggtgacagtgagtaaccaaatgcagaccagttctatgcaggataatgataaattcccttctagctctattgtaaattgttgtacagatgtcatatttcaattactaagtttcagcagcttattcttgtacaaatgtttaaaatatggcttttctaattggatattgtattttttttaagtcttcttgaaggcactctaattgctgctaaatgatgttgcttctttgctaaaaaattaaatgacctagaaggtgcaagttgactgtacatcatagatattaaaaagcagacagtcattaacaatcaagatgtaaaagtgatccatgttggacataattgagtttttaaatcagtttattgggttctagggctgtagaacacatagatactagatttttaatttgttcatggttattctacatttctagaaagttcttatcagcaagatggtcccataagcaaatttcttgtggtttgtacagatttgttaaaatgtgaacgttttctaactgcctcgtagggtagaaaccaatatttttcaggatgctgtatttcactcctgtaaggactttttctttattgtcacattcataatgctgatacttacatgtaagttgttcatgttgcagaaaaaggttatacgtaccacggattctctttaatattgtacagttaaactgtatttctgatgttgcaagccattttgttttttcattgtacatagacacattgtctctttaaaatgctgctgaaattgtagagagtatagccaaaacagtaataaacaatgacagttaaaatgtaaagactatgaaaattacattggaagggagctttcaagatggtaggatattgactaactgagctccttcacttaaaaatcagctgaataaattccttaagtatacttcaaaaaaaaaaaaaaaaaa

SEQ ID NO: 57302 - DNA, 3252 bp, Homo Sapiens
caaggaggctgctgattgtggcccacagcctcatctgaacgccaggagaccaggataccgaggcaccggatcccctctctgtgccctggggagccccagtgctgcccagtcaccccagggctgaggtctgcgtccctagtggtgcaaggcctggtaggaccacggggcagggaatgtgagcgccatctgagctcacggtgtcctgagtcgcggcttcgtgactttggcaggggcctccggaccagtgaccccagtcaaacccagagggtcttgggcggcagcgacgaaggaggtattcaggctccaggccaggtggggccggacgcccccagccatccaccatggtggtggcacaccccaccgccactgccaccaccacgcccactgccactgtcacggccaccgttgtgatgaccacggccaccatggacctgcgggactggctgttcctctgctacgggctcatcgccttcctgacggaggtcatcgacagcaccacctgcccctcggtgtgccgctgcgacaacggcttcatctactgcaacgaccggggactcacatccatccccgcagatatccctgatgatgccaccaccctctacctgcagaacaaccagatcaacaacgccggcatcccccaggacctcaagaccaaggtcaacgtgcaggtcatctacctatacgagaatgacctggatgagttccccatcaacctgccccgctccctccgggagctgcacctgcaggacaacaatgtgcgcaccattgccagggactcgctggcccgcatcccgctgctggagaagctgcacctggatgacaactccgtgtccaccgtcagcattgaggaggacgccttcgccgacagcaaacagctcaagctgctcttcctgagccggaaccacctgagcagcatcccctcggggctgccgcacacgctggaggagctgcggctggatgacaaccgcatctccaccatcccgctgcatgccttcaagggcctcaacagcctgcggcgcctggtgctggacggtaacctgctggccaaccagcgcatcgccgacgacaccttcagccgcctacagaacctcacagagctctcgctggtgcgcaattcgctggccgcgccacccctcaacctgcccagcgcccacctgcagaagctctacctgcaggacaatgccatcagccacatcccctacaacacgctggccaagatgcgtgagctggagcggctggacctgtccaacaacaacctgaccacgctgccccgcggcctgttcgacgacctggggaacctggcccagctgctgctcaggaacaacccttggttttgtggctgcaacctcatgtggctgcgggactgggtgaaggcacgggcggccgtggtcaacgtgcggggcctcatgtgccagggccctgagaaggtccggggcatggccatcaaggacattaccagcgagatggacgagtgttttgagacggggccgcagggcggcgtggccaatgcggctgccaagaccacggccagcaaccacgcctctgccaccacgccccagggttccctgtttaccctcaaggccaaaaggccagggctgcgcctccccgactccaacattgactaccccatggccacgggtgatggcgccaagaccctggccatccacgtgaaggccctgacggcagactccatccgcatcacgtggaaggccacgctccccgcctcctctttccggctcagttggctgcgcctgggccacagcccagccgtgggctccatcacggagaccttggtgcagggggacaagacagagtacctgctgacagccctggagcccaagtccacctacatcatctgcatggtcaccatggagaccagcaatgcctacgtagctgatgagacacccgtgtgtgccaaggcagagacagccgacagctatggccctaccaccacactcaaccaggagcagaacgctggccccatggcgagcctgcccctggcgggcatcatcggcggggcagtggctctggtcttcctcttcctggtcctgggggccatctgctggtacgtgcaccaggctggcgagctgctgacccgggagagggcctacaaccggggcagcaggaaaaaggatgactatatggagtcagggaccaagaaggataactccatcctggaaatccgcggccctgggctgcagatgctgcccatcaacccgtaccgcgccaaagaggagtacgtggtccacactatcttcccctccaacggcagcagcctctgcaaggccacacacaccattggctacggcaccacgcggggctaccgggacggcggcatccccgacatagactactcctacacatgatgcccgcccacccgggctgccccgcctcagccccagctgccctggcgtggccatgtggctttgcccagcctgctgcaatccaagagagcaaggaagagaaattccatgggtgactttcctccgcagaaagcaaagtttggggagggctgacgattttgtagaacacaacagtgacaattttttttaaaagaatagaaggcaggagggggaattcgacattgttgaagacataatttataccaagttatgccagttggggagggaaggactaaaaataatattgcaggcagggctgggttgggttttttttttttcccccctgaactggaaggatactacctgtacaacatctgtggacacctcatgctctgttcaaggccatcacaaaggaaccgccagggagaagcagccggctctcaaagctcccacgcagctctcccgccactggccactcgctggcgacccgatggaaggttttcaggctcctcacaaaggagagagggaagaaaagatcttttgccctggagatatggtcctgaaatctctcccctggcttattccataccatttcccttgcagatttgcagaaacatggcatctttcactgcattctttgaacaatcatgtagtcgattaaaaaaaaaaaacaaacttttttttcctaggctgaagccctcttcagttccatgcaccacgctccgtagaagccccggcggaagccgtagctttccctgccacctggaggtgcatctgtctgcctgtctatccctgtcgcggtgtctctaagtacagatgggtagatagagccacatgcacggtccttaccgttcttcttgggtcagttcttaccatttcctgaacaatagaattgtgaaagtgttaaaaa

SEQ ID NO: 57303 - DNA, 2438 bp, Homo Sapiens
cgaagaggatccggagcagctgctgccagcccgcgggcactgaagtcctcccggctgccgctcgagtagccacgggcgcgatcgggaccagaagtctcctcctccatgatcactttggaagccgggggaagactttgccctgccctgagagctggtctgcgtttcccaggcgcggcggcggcggagcagcagctgcagcagccgagtccaaataggagcggccacagccaggggcgtgtgcgccccgcgcggagcgagctcgggttcccctcggaatgtccccggggcgcccggcgcgctgaccccgaagccgcctccgccttcggcgcctgctgcctccctcggccaggcttgttgttcgggactgtgagcttcctggctcctgggcagtggggaagcccccgggggcgagtgacctcagctggccacgacccagccctcccccgtgcgtatctcgcttaagatggcagcggagtcaggggaactaatcggggcttgtgagttcatgaaagatcggttatattttgctactttaaggaatagaccaaaaagcacagtaaatacccactatttctccatcgatgaggagctggtctatgaaaatttctatgcagattttggaccgctgaacttggcaatggtgtacagatattgctgcaaactaaacaagaaactaaaatcatacagtttgtcaagaaagaaaatagtgcactacacctgttttgaccaacggaaaagagcaaatgcagcatttttgataggtgcctatgcagtaatctatttaaagaagacaccagaagaagcctacagagcactcctgtctggctcaaaccccccctatcttccattcagggatgcttcctttggaaattgcacttacaatctcaccattctcgactgtttgcagggaatcagaaagggattacaacatggattttttgactttgagacatttgatgtggatgaatatgaacattatgagcgagttgaaaatggtgacttcaactggattgttccaggaaaatttttagcatttagtggaccacatcctaaaagcaaaattgagaatggttatcctcttcacgcccctgaagcctactttccttatttcaaaaagcataatgtgactgcagttgtgaggctaaacaaaaagatttatgaggcaaagcgcttcacagacgctggcttcgagcactatgacctcttcttcatagatggcagcacacccagtgacaacatcgtgcgaaggttcctgaacatctgtgagaacaccgaaggggccatcgccgttcactgcaaagctggtcttggaagaacagggacattgatagcctgttatgtaatgaaacactacaggtttacacatgctgaaataattgcttggattagaatatgccggccaggctctattataggaccccagcagcacttcctggaagaaaaacaagcatcgttgtgggtccaaggagacattttccgatccaaactgaaaaatcgaccatccagtgaaggaagtattaataaaattctttctggcctagatgatatgtctattggtggaaatctttcaaaaacacaaaacatggaacgatttggagaggataacttagaagatgatgatgtggaaatgaaaaatggtataacccagggagacaaactacgtgccttaaaaagtcagagacagccacgtacctcaccatcctgtgcatttaggtcagatgatacaaaaggacatccaagagcagtgtcccagcctttcagattaagttcatccctgcaaggatctgcagttactttgaagacatcaaaaatggcactgtccccttcagcaacggccaagaggatcaacagaacttctttgtcttcgggtgccactgtaagaagcttttccataaactcccggctagccagttctctagggaacttgaatgctgcaacagatgatccagagaacaaaaagacctcctcatcctctaaggcaggcttcacagccagcccgtttaccaacctcttgaatggcagctcccagccaactaccagaaattaccctgagctcaacaataatcagtacaacagaagcagcaacagcaacgggggcaacctgaacagccccccaggcccccacagcgccaagacagaggagcacaccaccatcctccgaccctcctacaccgggctttcttcttcttcagcgagattcctgagccgttctatccctgtaagtgcgcagacaccacctcctggtcctcagaaccctgaatgcaacttctgtgccttgccttcccagccgaggctgccaccaaagaaatttaatagtgccaaggaagccttctgagcgatgccttccctctgtgctgtgaaactgtctatgcactacattctgctagctcctcttcaagtaaacgccaagtcacaaaaaaaaaaaaaaaaaaaaaaaa

SEQ ID NO: 57304 - DNA, 3285 bp, Homo Sapiens
attcttccggtttcagaagttaaggctggtgtcctggccccagtccacctctgggagcgcctgcgccgctccgcggagagtccgtggatctcacagtgaaaaatgtttgctgacccttgacattgacaaactgctgacagctcagatgatccatgattggaaggatgtggtcatcaccaagatgtctttctttctccggttcccagttttccagacctgaagtgttttccaatcaaagcgaagagacgatctgtggatgttgaatatgcaaggagctgaagagagagacattagaagagagacttgtccaggctgggtaaacaagaacaagcctgctctggagcaggatgtctgtaaaattgactcatcagggatagtagtaaagaggttccaagaggatgaataccaagattctacatttgaagaaaaatatgcatgtgagggcatgaaggaaaactctcctagggagattgctgaatcatgccttttccaggaaggaggttttgggagaataactttcatccacaaagaagcaccccctgaaattattagtcaaggatataattttgagaaaagcttgcttttgacctcaagccttgttacacgtctcagggtttctacagaagagagtctgcatcagtgggaaacaagtaatatacaaaccaatgatatttcagaccaaagtaaatgtccaactctctgcacacagaaaaaatcttggaaatgtaatgaatgtggaaaaacctttactcagagctcatcccttacccaacatcagagaactcatactggagagagaccctacacatgtgaggaatgtgggaaagcctttagtcgtagttcattccttgttcaacatcaaagaattcacactggagtgaaaccatatggatgtgagcagtgtgggaaaacatttcgatgtcgatcatttcttactcagcatcaaagaattcacactggagagaaaccttataaatgcaatgaatgtgggaattccttccgcaatcactcacatctcactgaacaccagagaattcacactggagagaaaccttataaatgcaataggtgtgggaaggcattcaatcagaatacacaccttattcatcatcagagaattcacactggtgagaagccttacatatgcagtgaatgtggctcttcttttcgaaaacactcaaatcttacgcaacatcagagaattcacactggggaaaaaccccataaatgtgacgaatgtgggaaaactttccaaacaaaggcaaacctctctcagcatcagagaattcatagtggagagaaaccctataaatgtaaagaatgtggcaaagccttttgtcagagcccatctcttattaaacaccagcgaattcatactggagaaaaaccatataagtgtaaagaatgtggcaaagcgtttactcagagcaccccactcactaaacatcagagaatacatacaggggagagaccctacaaatgcagtgaatgtggtaaagccttcattcagagcatttgccttattcggcaccagagaagtcacactggagaaaaaccctataaatgcaatgaatgtggaaagggctttaatcagaacacctgcctcactcagcatatgagaattcatactggagagaagccctataaatgtaaagaatgtgggaaagcctttgctcatagctcatctcttactgaacatcatagaactcacactggtgagaagctctataaatgtagtgagtgtgagaaaaccttccgcaagtatgcacaccttagtgaacattacagaattcacactggtgagaagccttatgagtgtattgagtgtggaaagttcttcagacatagttcagtccttttcagacatcagaaacttcacagtggtgactaatgctgccatttaggttatgacagtttctctagcgaggatgactacgaatctgactgggagtagaggggcaggtagagttcctggagggaaggatgaaggagccttggctactgtactctgagaggaatgtttccagaaatggaggtgggagcttagggaatgcagagcctacttgaggtgggcatctgggaatacagggtagaaagaaattcctgcttttcagataaagcctacacattgccactgtctccccatgtgactcttacagcttgaggaggcatttgttagcacttctgttcactttactacatcctgccccacattctgacttgtcacccattttcgttggctggcaggttgagatgtttttcttaaacactgcctgtcagtgtgaagtggcacagctctgatgtagtgctaagtctagcctccagatttgaggcagccctgaccatgctaccatgggggaggctcccaacctgtggaagtggtcctgtgaaaaggagacagaaacaagtaagagccaaaaaaaaaaaaaaaaaaaatccatatccattcattaaaaaaatgagatataaagcaacaactgggctgacctctatagatctgccagtaaagaaggctttctttcattatcagggtgaaggtctttcctgattcttccaagctttgaggtgactcagagctaagaatgaaataggagaccaagttagaattcatgatactggtttatggggaggcagtcatacctgttcagagaaccaggaagactcaatatctatctcagaggaaatatggttacccaggaaagaaatggtctgctagagtgataagactcagaacaggaagcctgcatgtgactgagcaagtcacctacataaccctgcctgtactaaggtgtacacctgtctattgtaagtttgcctaggctgttggtgtacagagaccagaggagagagacacactaggactaacaatgtcctaacaaaatggtacttagtttgttggtctttaggagaaagcattagtaatgaaagaagaaagaattttcacttggttggacattggggctgcttaagaaagttgacatttgtcgtggaatgactttggaaagacttctaaaagaatctttttcaaatccctgaaaatcaggatagcacattttgctactgactgtgacagtgttttattcttttgagagaaatgacatagttttccctttatttcccaaattcctttcatgttcttaactgctacccagaaattgagcttcagaagattgaggatagcctttgattggtatttaaaataatttctaagctgtgaagcttatagcatttttaaagtatggctattaaaaacactaagttgattctggaaaaaaaaaaaaaaaa

SEQ ID NO: 57305 - DNA, 965 bp, Homo Sapiens
gaagctctcctcgcggggcgggccggccggccgcacccccggcctggggcctccggtcgtagtaaagcgcaggcgggcggggaggcgggagcaggagcccgcggccggccagccgaagatggtggcggctactcctcctgtcatacacgtggacctaactgcaccagtagcttttctgagaatacttgctgaaaaggaagttttctggaatggtatttgctaagtggaagccagaagaggaggaaaatgttttgccacgtggatgtgaagatttcctctaaaaggcagacctgtctaactacaagccagacttgggttttctcctgtagtttgaagacacactgactcctgacaaaatgcagcctgcaacttcctggagaacaactcagtgtcacattaaagtttattatgtatttaatgatacactgtttaattgacagttttgcatagtttgtctaactttagagaattaagagcctctcaactgagcagtaaaggtaaggagagctcaatctgcacagagccagtttttagtgtttgatggaaataagatcatcatgcccacttgagacttcagattattctttagcttagtggttgtatgagttacatcttattaaagtcgaaattaatgtagttttctgccttgataacatttcatatgtggtattagttttaaagggtcattaggaaaatgcacatattccatgaattttaagacccatagaaaagttgaagaatgcttaattttcttatccagtaatgtaaacacagagacagaacattgagatgtgcctagttctgtatttacagtttggtctggctgtttgagttctagcgcatttaatgttaataaataaaatactgaattttaaagctgttaagaaattgtccagaacgagaatattgaaataaaaacttcaaggtcaaaaaaaaaaaaaaaaaaaaaaaaaaaaaaaaaaaaa

SEQ ID NO: 57306 - DNA, 983 bp, Homo Sapiens
cctggatcctgctgcgagaaggggcgcgatttcttccggagaggttccctgtcgcgcccaagtctgggaagtgccctttctctcttaggtaccacctcatggagacccccgcggccgccgcccccgctgggagcttattcccctccttcctgctcctggcctgcgggacgctggtggccgccttgctgggcgccgctcaccgcctggggctcttctatcagctgctgcacaaggtggacaaggcaagcgtccggcatggcggagagaacgtggccgctgtgctgagggcccatggtgtgcggttcatcttcacgctggtcggtgggcacatttccccgctgctggtggcctgtgagaaactgggcatccgtgtggtggacacacgccatgaggtcacggccgtctttgctgctgatgctatggcccgcctgtccgggacggtgggcgtggcggcagtgacagcaggccctggcctcaccaacacggtgactgcggtgaagaatgctcagatggctcagtccccaatcctgcttctgggtggggctgccagcactctgctgcagaaccggggtgcgctccaggctgttgatcagctgtcccttttccggccacccggttgtggtcaacatcctcattgggaggacggacttccgcgatggctccattgctgtatagggccttgtgggtcaggacgcttggctgccttcctgcccctggactgtgtccagctggtttggagtctcatcattgcttgccctgggcctatcccatgaggcccagtgactccacaacctccctgaggaggggatggaggggtcaaatctcagagaggctctcttgtgagctcttggaccctcctcttcacggacccaactgtgccgtttgtcccctctcttatggagactgaataaaccacctctggcccatgtaggcccaagtactcagtctcagaaaaaaaaaaaaaaaaaaaaaaaaaaaaaaaa

SEQ ID NO: 57307 - DNA, 3077 bp, Homo Sapiens
gggggtccgttccccaacttcctcggcgctccggactcccaagtctccgccggaccctcctttggatattcctcgtgtctccgattctgagacagagggggaagacggtggggcctccccacctgccccgcagaagatgcagttctttggccgcctggtcaataccttcagtggcgtcaccaacttgttctctaacccattccgggtgaaggaggtggctgtggccgactacacctcgagtgaccgagttcgggaggaagggcagctgattctgttccagaacactcccaaccgcacctgggactgcgtcctggtcaaccccaggaactcacagagtggattccgactcttccagctggagttggaggctgacgccctagtgaatttccatcagtattcttcccagctgctacccttctatgagagctcccctcaggtcctgcacactgaggtcctgcagcacctgaccgacctcatccgtaaccaccccagctggtcagtggcccacctggctgtggagctagggatccgcgagtgcttccatcacagccgtatcatcagctgtgccaattgcgcggagaacgaggagggctgcacacccctgcacctggcctgccgcaagggtgatggggagatcctggtggagctggtgcagtactgccacactcagatggatgtcaccgactacaagggagagaccgtcttccattatgctgtccagggtgacaattctcaggtgctgcagctccttggaaggaacgcagtggctggcctgaaccaggtgaataaccaagggctgaccccgctgcacctggcctgccagctggggaagcaggagatggtccgcgtgctgctgctgtgcaatgctcggtgcaacatcatgggccccaacggctaccccatccactcggccatgaagttctctcagaaggggtgtgcggagatgatcatcagcatggacagcagccagatccacagcaaagacccccgttacggagccagccccctccactgggccaagaacgcagagatggcccgcatgctgctgaaacggggctgcaacgtgaacagcaccagctccgcggggaacacggccctgcacgtggcggtgatgcgcaaccgcttcgactgtgccatagtgctgctgacccacggggccaacgcggatgcccgcggagagcacggcaacaccccgctgcacctggccatgtcgaaagacaacgtggagatgatcaaggccctcatcgtgttcggagcagaagtggacaccccgaatgactttggggagactcctacattcctagcctccaaaatcggcagacaactacaggatctcatgcacatctcacgggcccggaagccagcgttcatcctgggctccatgagggacgagaagcggacccacgaccacctgctgtgcctggatggaggaggagtgaaaggcctcatcatcatccagctcctcatcgccatcgagaaggcctcgggtgtggccaccaaggacctgtttgactgggtggcgggcaccagcactggaggcatcctggccctggccattctgcacagtaagtccatggcctacatgcgcggcatgtactttcgcatgaaggatgaggtgttccggggctccaggccctacgagtcggggcccctggaggagttcctgaagcgggagtttggggagcacaccaagatgacggacgtcaggaaacccaaggtgatgctgacagggacactgtctgaccggcagccggctgaactccacctcttccggaactacgatgctccagaaactgtccgggagcctcgtttcaaccagaacgttaacctcaggcctccagctcagccctcagaccagctggtgtggcgggcggcccgaagcagcggggcagctcctacttacttccgacccaatgggcgcttcctggacggtgggctgctggccaacaaccccacgctggatgccatgaccgagatccatgagtacaatcaggacctgatccgcaagggtcaggccaacaaggtgaagaaactctccatcgttgtctccctggggacagggaggtccccacaagtgcctgtgacctgtgtggatgtcttccgtcccagcaacccctgggagctggccaagactgtttttggggccaaggaactgggcaagatggtggtggactgttgcacggatccagacgggcgggctgtggaccgggcacgggcctggtgcgagatggtcggcatccagtacttcagattgaacccccagctggggacggacatcatgctggatgaggtcagtgacacagtgctggtcaacgccctctgggagaccgaggtctacatctatgagcaccgcgaggagttccagaagctcatccagctgctgctctcaccctgagggtccccagcctctcaccggccccagctgacctcgtccattcagcccctgccaggccaagcccagccactgccctcccgggcagatctgggcccaggcacctctgagtccatagaccaggcctgggagaatgccaagctgcctgcccgaggctggtcctgaaggcctgtctcccactaaccccgccttccagcactttctgtcattccaggctgggaaagtctagagccccctttggcccctttccctgactgtcaaggacaactgactcccccatcagctcaaacattaagggtacccgggcacaaccgtacccctgcccccagccccagcctccctgagggcctgccgggctgcctctgccccagcccccagcaagggcactcccaggcttcctggtgggtgcagcccactccctctgccctctgctccgttccctgggggctgggactaaagaaatgggtgtcccccaccccatcagctgggaaagcccaggccgcaggagtgggatgcccgttggactttgcccctcacactggcccagcccctcacactgccccaccccgagaaccctcagctctcaaaggtcactcctgggagtttcttcttcccaatggaagtggcttaagagccaaaactgaaataaatcatttggattcaagttcaaaaaaaaaaaaaaaaa

SEQ ID NO: 57308 - DNA, 2413 bp, Homo Sapiens
ctagcagcgggtcggagatcgaaggaacgggccaattgcggctgaaacgtctttggaaggaggaagggggtgagggagcatccctttgagtttcgcctcttctcgaggcggtggtgggaagggagacatacttaatactgccctcttaatccaacggaccttacatcgtgtagactgccgggagggcggcgggaaaagggcaagacgggagttggggaagggaaggagccaggaagccgcgcgggagggcgcgcgcgcgcgcccctttttcagcagtgtggcggggtcgcacgcacgcccgcctcggcggctgggcgcgatttgcgacagtggggggggcggtggaggtggcggcggcagcggcaactttgcggcaagctcgggccgggcttgcttgacggcggtgtggcggaggccccgccccaggcggcaggaacctggagggaggcggaggaatatgtccgagagggaagtgtcgactgcgccggcgggaacagacatgcctgcggccaagaagcagaagctgagcagtgacgagaacagcaatccagacctctctggagacgagaatgatgacgctgtcagtatagaaagtggtacaaacactgaacgccctgatacacctacaaacacgccaaatgcacctggaaggaaaagttggggaaagggaaaatggaagtcaaagaaatgcaaatattctttcaaatgtgtaaatagtctcaaggaagatcataaccaaccattgtttggagttcagtttaactggcacagtaaagaaggagatccattagtgtttgcaactgtaggaagcaacagagttaccttgtatgaatgtcattcacaaggagaaatccggttgttgcaatcttacgtggatgctgatgctgatgaaaacttttacacttgtgcatggacctatgatagcaatacgagccatcctctgctggctgtagctggatctagaggcataattaggataataaatcctataacaatgcagtgtataaagcactatgttggccatggaaatgctatcaatgagctgaaattccatccaagagatccaaatcttctcctgtcagtaagtaaagatcatgctttacgattatggaatatccagacggacactctggtggcaatatttggaggcgtagaagggcacagagatgaagttctaagtgctgattatgatcttttgggtgaaaaaataatgtcctgtggtatggatcattctcttaaactttggaggatcaattcaaagagaatgatgaatgcaattaaggaatcttatgattataatccaaataaaactaacaggccatttatttctcagaaaatccattttcctgatttttctaccagagacatacataggaattatgttgattgtgtgcgatggttaggcgatttgatactttctaagtcttgtgaaaatgccattgtgtgctggaaacctggcaagatggaagatgatatagataaaattaaacccagtgaatctaatgtgactattcttgggcgatttgattacagccagtgtgacatttggtacatgaggttttctatggatttctggcaaaagatgcttgcattgggcaatcaagttggcaaactttatgtttgggatttagaagtagaagatcctcataaagccaagtaagtatttagaaatttctgttcaaaatttcaggctttttctccacacttgtatgccaatgtagagaagatcatttatatttgcagtgccatccttaagtcatttttaacatttactgttttcagagttaaagttattcttttttattccaataatttttgtttttcctaagtaccttggtgacaagtcatttcttgtttttatacaaattatgtagtgcttgttgaacttaaaatatatctaaattttataaaatttgagactgagctcttagtgaagtatattctggttttaagtgcttttcgtatgacttggaacatctgcttattttctaatccgctgttttagggtagacactgacaacgttatgtgtggtctttaacctgttgtcatgttttttccctagatgtacaacactgactcatcataaatgtggtgctgctattcgacaaaccagttttagcagggatagcagcattcttatagctgtttgtgatgatgccagtatttggcgctgggatcgacttcgataaaatacttttgcctaatcaaaattagagtgtgtttgttgtctgtgtaaaatagaattaatgtatcttgctagtaagggcacgtagagcatttagagttgtctttcagcattcaatcaggctgagctgaatgtagtgatgtttacattgtttacattctttgtactgtcttcctgctcagactctactgcttttaataaaaatttatttttgtaaaaaaaaaaaa

SEQ ID NO: 57309 - DNA, 1159 bp, Homo Sapiens; identical to SEQ ID NO: 29521

SEQ ID NO: 57310 - DNA, 454 bp, Homo Sapiens
atgcccgcaaccccgtccctgaaggtggtccatgagctgcctgcctgtaccctctgtgcggggccgctggaggatgcggtgaccgttccctgtggacacaccttctgccggctctgcctccccgcgctctcccagatgggggcccaatcctcgggcaagatcctgctctgcccgctctgccaagaggaggagcaggcagagactcccatggcccctgtgcccctgggcccgctgggagaaacttactgcgaggagcacggcgagaagatctacttcttctgcgagaacgatgccgagttcctctgtacctcagagtgcagaaccacagacggcttcggctgtgcctagggcaacagccaacctaggagccagcgggctttcggggaaaaaaaagaaaaagacatctaaaataaaatgtttaaactgtttcaaaataaaaaaaaaaaaaaaaaaa

SEQ ID NO: 57311 - DNA, 2412 bp, Homo Sapiens
tggaaaggagagctaccatcactaagggctgaaaacacagttaaatcactttcaaagttaaaagactattaagaacacaagatggggactcctgcttctggaaggaaaagaacacctgtgaaagaccgattttctgcagaagatgaagctttgagtaacattgccagagaggcagaggcaaggctggcagcaaaacgggctgcccgggcagaagcaagagatatacgcatgagagaactggaacgacaacaaaaagagtactctcttcattcctttgatcggaagtggggacagattcagaagtggctggaagattcggaaagggccaggtattcccaccggtccagtcaccatcgtccttatctgggagttgaggatgcattgtccattcgaagtgttggcagtcacaggtatgatatgttcaaggatagatcatcaagactttcatcattaaatcattcttacagtcactctcatggaatgaagaagaggtcttctgattctcataaagacctactgagtggcctctactttgaccagagaaactatagcagtcttagacatagcaaacccacctctgcctactacactcggcagtcttcttccctgtacagtgaccctctggcaacatataagagtgacagggcctctcctactgcaaattctggtctgctgagaagtgccagtctggcatcattgtacaatggtggattatataacccttatggtcctcgaactccatctgaatgcagttattattcatcaagaataagttcagcccgaagcagtccagggtttaccaacgatgacactgcaagcattgtgtcttctgatcgtgccagtcgtggacgaagggagagtgtggtatctgccgctgattatttcagtcgctccaatcgtaggggaagtgttgtctctgaggtggatgatatcagtatcccagatttgtccagcttggatgaaaaatctgacaaacagtatgctgaaaattatacaagaccttcatctcgaaattctgcctcagcaacaacccctctaagtggaaactcatccagacgaggaagtggggacaccagcagcttaatagatccagacacttcattaagtgaattgcgggatatctatgaccttaaggaccagatacaggatgtagaagggagatacatgcaggggcttaaagaactaaaggaatctttgtctgaagtggaagaaaaatacaagaaagccatggtttccaatgcacagttagacaatgagaagaacaatttgatctaccaagtagacacactcaaggatgttattgaagagcaggaggaacagatggcagaattttatagagaaaatgaagaaaaatcaaaggagttagaaaggcagaaacatatgtgtagtgtgctgcagcataagatggaagaacttaaagaaggcctgcggcaaagagatgagcttattgaggagaagcagcgcatgcagcagaaaatagacaccatgacaaaagaggtgtttgacctccaggagacacttctttggaaagataaaaaaattggggccctagagaaacagaaagaatacattgcctgccttaggaatgagcgagatatgctcagagaggagctggctgacctgcaggagacagtgaagacgggagagaaacatggcttagttataatccccgatggcactcccaatggtgatgtcagtcatgaaccagtggctggagccatcactgttgtgtctcaggaagctgctcaggtcttggagtcagcaggagaagggccattagatgtaaggctacgaaaacttgctggagagaaggaagaactactgtcacagattagaaaactgaagcttcagttagaggaggaacgacagaaatgctccaggaatgatggcacagtgggtgacctggcaggactgcagaatggctcagacttgcagttcatcgaaatgcagagagatgccaatagacaaattagcgaatacaaatttaagctttcaaaagcagaacaggatataactaccttggagcaaagtattagccggcttgagggacaggttctgagatataaaactgctgctgagaatgctgagaaagttgaagatgaattgaaagcagaaaaacggaagctacaacgagagttacgaacagcactggacaagattgaggagatggagatgaccaacagccacctggccaagcggctggagaagatgaaggccaataggacagcacttctggcccagcagtaggaaaaccacccttcaacctgggtgatgctccttggggccctacctagagggactgacttttgtccattgacacaaaccccttttagtactgttttgagttttgtcattaaaacagccacctttgtattttataatttatgacagaatgaagtcattttgaatcta

SEQ ID NO: 57312 - DNA, 1227 bp, Homo Sapiens
gcaagagggcggaacgcgggacgccaggcaccctagctcccgacggacgcagttttcagttgcacgggcgagctccgggccggctgcggagcgactccccgccgccaagtgggcggcgtggctgtcgggaaagaagggctggggcctgccgttcttcctcccgagtatcccctccagctggacgaccccacgctgcagcacgggcttccggcttctctcctcagtggccaattcgagggcacagcgggctccggaggcgcggcggcaagcctatcccgcctcccaaccacagcctccagcacccgagagaacggccgcccacagcacacgttctccggacaggagggcgaaggcccaagacctggagagatgggcagctctcaaaaaaggcacaaacaattgaaggatggataccatggcatatgttaaaagcgtgttgaaaggaaaataagaaagccaggaatctcaggatgaatcagtctagatcgagatcagatggtggcagtgaagaaaccttacctcaagaccataatcatcatgaaaatgagagaagatggcagcaagagcgtctccacagagaagaggcctattatcagtttattaatgaactcaatgatgaagattatcggcttatgagagaccataatcttttaggcacccctggagaaataacatcagaagaactgcaacagcggttagatggcgtcaaggaacaactagcatctcagcctgacttgagagatggaacgaattacagagactcagaagtccctagagaaagttcacatgaagattctcttctagaatggttgaacacctttcggcgcacaggaaatgcaactcgaagtggacaaaatgggaaccaaacttggagagctgctttgccagatacaagctgaagtgctaccagaaaaccagttgttaagtctatctggaaaaatagactgtgaagcacctcatcttcatttcaatagcttcgctggaacctggagcctaaggggtaaaatgtattatctttctcttcacaaacagttttttttcttttatggaacatagaatatgacaacatttgttttgtcaactgattacattttaaaacattgtacttgttcatattgtacttggctttgaaataccctgaagcatctatggaattgtaatttattgtaatgcaataagcatttatgtaattaaaaaaaagcattcttaaatatgaaaaaaaaaaaa

SEQ ID NO: 57313 - DNA, 1493 bp, Homo Sapiens; identical to SEQ ID NO: 29606

SEQ ID NO: 57314 - DNA, 2035 bp, Homo Sapiens
cgtggatcccgagaaagaggcgcaggacgaggaggcagaacccgactggcgcgtagagcagcagcacgagcagtaggaagcagtcacccggaagcctgggggcgagaggcgaagtggtcaggcgccgaaggccgagagcacgcggggatcggtctcttcccgccgggtctcttaccggtgcgagtcaaagagccgctccggccccggccctgagggaagctccataactgctgcttcaggagcgcccggccgtcgccgccgccgccattttcgcgcccggccgcaggggctcttgggaaggcggagtctttgggcatccgcccggggtgaggggacccgaagtcctgaggcgcgccggaagggctagcggtcccagcataccccgcggccccttgggccgtctcacaactcgcgtccggcggagaccacaattcccggcattcgtggggcagggaggagtcggcctcccggaatcctggtcccggcgtgcacttctgaaggacttcaggtaccggcgtgccccgcgtcctactgtccgcctgctcgcgtcctgggtgccgcctctgagtagggcgggcgaggaggcagccaaggcggagctgatggctgcgccgagggcggggcggggtgcaggctggagccttcgggcatggcgggctttggggggcattcgctgggggaggagaccccgtttgacccctgacctccgggccctgctgacgtcaggaacttctgacccccgggcccgagtgacttatgggacccccagtctctgggcccggttgtctgttggggtcactgaaccccgagcatgcctgacgtctgggaccccgggtccccgggcacaactgactgcggtgaccccagataccaggacccgggaggcctcagagaactctggaacccgttcgcgcgcgtggctggcggtggcgctgggcgctgggggggcagtgctgttgttgttgtggggcgggggtcggggtcctccggccgtcctcgccgccgtccctagcccgccgcccgcttctccccggagtcagtacaacttcatcgcagatgtggtggagaagacagcacctgccgtggtctatatcgagatcctggaccggcaccctttcttgggccgcgaggtccctatctcgaacggctcaggattcgtggtggctgccgatgggctcattgtcaccaacgcccatgtggtggctgatcggcgcagagtccgtgtgagactgctaagcggcgacacgtatgaggccgtggtcacagctgtggatcccgtggcagacatcgcaacgctgaggattcagactaagtttggaaactctggaggtcccctggttaacctggatggggaggtgattggagtgaacaccatgaaggtcacagctggaatctcctttgccatcccttctgatcgtcttcgagagtttctgcatcgtggggaaaagaagaattcctcctccggaatcagtgggtcccagcggcgctacattggggtgatgatgctgaccctgagtcccagggctggtctgcggcctggtgatgtgattttggccattggggagcagatggtacaaaatgctgaagatgtttatgaagctgttcgaacccaatcccagttggcagtgcagatccggcggggacgagaaacactgaccttatatgtgacccctgaggtcacagaatgaatagatcaccaagagtatgaggctcctgctctgatttcctccttgcctttctggctgaggttctgagggcaccgagacagagggttaaatgaaccagtgggggcaggtccctccaaccaccagcactgactcctgggctctgaagaatcacagaaacactttttatataaaataaaattatacctagcaacatattatagtaaaaaatgaggtgggagggctggatcttttcccccaccaaaaggctagaggtaaagctgtatccccctaaacttaggggagatactggagctgaccatcctgacctcctattaaagaaaatgagctgctgaaaaaaaaaaaaaaaa

SEQ ID NO: 57315 - DNA, 3177 bp, Homo Sapiens
atggcagctacctctcctcctcaccgcccagtcgtttctaagcctggctcgtcgccgttgctgctccgccaagcctttcctcggtgccctctctcttttagaacaaattacttcatctccaggcccttctcagggcagcttctttgcaggggccatagggcgtcggaaaggtctttggtccaggaaagccgcgagccacagatccaagaggaaaaagccgttcccggcccgggccttgcccaaggcacgagagtaaatgcaccttccgcgtgcctcggcgcacctgggctcacctgtcccctcccgcagtgcctgcagacagggagggagcgcggctgggccagaaggctgatcaccgcctgccccctgctggccagtgtcagtattgagcccgctgccgctcgaccagaacgtcccagggatggaatgaagaggacccggaagcgccaagtgactgagggccgaagacactcacctgtggagcctgtgcacgtaggtagaggcggcggctctgagtccaggagctccacaccagccatgaactacgtggggcagctggcggagacggtgtttgggacggtgaaggagctgtaccggggcctgaacccagccacactgagcggcggcattgacgtgctggtggtgaagcaggtggacggctcgttccggtgctcacccttccacgtgcgttttggcaagctgggcgtcctgcggtcgcgggagaaggtggtagacattgagctcaatggggagcctgtggacttgcacatgaagcttggggacagcggggaggccttctttgttcaggagctggagagcgatgatgaacatgtgcctcccggcctgtgcacctcacccatcccttgggggggtctgtctggcttcccctcggactcccagctgggcactgccagtgagcctgagggcctcgtcatggcaggcacggcctccactgggcggaggaagaggcgtcgcaggaggaaacccaagcagaaagaggatgcagtggcaactgattctagtccagaggaactggaggcaggcgctgagagtgagctatccctgccggaaaagctgaggccagagcccccaggcagtgtccagttggaagagaagtcttcactgcagcccaaagacatctacccctactcggatggcgagtggcccccccaggccagcctctcagcaggtgagctaacatcccctaagagcgactcggagctggaggtgcggaccccggagcccagtcccctaagagccgagtcccacatgcagtgggcctgggggaggctgcctaaggtggccagagctgagcggcccgagtcctcagtggtccttgaaggcagagctggggcaacctctcctcctcggggaggacccagcactccctctacctctgtggctggcggcgtggaccctttgggactcccaatccagcaaacagaggctggtgccgaccttcagcctgacacagaggatcccactctagtgggtccccctctccacaccccagagacagaggaaagcaagactcagagctctggggacatgggcctccctcctgcctccaagtcatggagctgggccactctggaggttccagttcccaccgggcagccagagagggtctccagggggaaaggctccccaaagagaagccagcacctgggccccagtgacatctacctggatgacttgccctccctggactctgagaatgcagcgctttacttcccccaaagtgactctgggctgggggccagaagatggagtgaacccagcagtcagaagtccctgagggaccccaaccctgaacatgaacctgaacccactctggacacagtggatacaatagcactgtccctctgtggtggactggctgacagccgggacatctccctagagaaattcaaccagcacagcgtctcttaccaggacctcaccaaaaaccccggacttttggatgacccaaacctagtggtgaaaatcaatggaaagcattataactgggctgtggctgcccccatgatcctctccctgcaagccttccagaaaaacttgcccaagagcaccatggacaagctggagagggagaagatgccccggaagggtgggcgatggtggttttcctggcgacgcagggacttcctggccgaggagcgcagtgcccagaaggagaagactgcagccaaggagcagcaggggtccagcctcctcttggcatctcccgggagtgaaggccctttggctggaggagatggcctgagagccagtgtggtccacagggagaagacagaagtcctgagcagtgatgacgatgccccagacagccctgtgatcctggagatcccctccttgccaccctccactccaccctccactcctacctacaagaagtccctccgcctctcctccgatcagatccggcgcctgaacctgcaagaaggtgccaatgatgtggtcttcagcgtgaccactcagtaccagggcacctgccgctgcaaggccaccatctacctgtggaaatgggacgacaaggtggtcatctctgacatcgacggcaccatcaccaagtcagatgctctgggccatatcctgccccagctggggaaagactggacacaccagggcatcaccagtctctatcacaaaatccaactaaatgggtacaagttcctgtactgctcggcgcgggccattggcatggcggacctcaccaaggggtacctgcagtgggtgagcgaggggggctgtagcctccccaagggccccatccttctgtctcccagcagcctcttctctgccctccacagagaggtgatcgagaagaaaccagaggtgttcaaggtcgcctgcctgagtgacatccagcagctgtttctgccccacggacagcccttctatgctgcctttgggaataggcccaatgatgtctttgcctaccggcaggtgggcctgcctgagtcacgcatcttcacagtcaacccccggggagagctcatccaggagctcataaagaaccacaaatccacgtatgagcggcttggtgaagtggtcgagctcctcttcccacctgtggcccgtggccccagcacagacctggccaaccctgaatacagtaacttctgctactggcgggagccactgcctgctgtggaccttgataccctggactga

SEQ ID NO: 57316 - DNA, 2984 bp, Homo Sapiens
gaggaggaacagaaaagaaaagaaaagaaaaagtgggaaacaaataatctaagaatgaggagaaagcaagaagagtgacccccttgtgggcactccattggttttatggcgcctctactttctggagtttgtgtaaaacaaaaatattatggtctttgtgcacatttacatcaagctcagcctgggcggcacagccagatgcgagatgcgtctctgctgatctgagtctgcctgcagcatggacctgggtcttccctgaagcatctccagggctggagggacgactgccatgcaccgagggctcatccatccacagagcagggcagtgggaggagacgccatgacccccatcctcacggtcctgatctgtctcgggctgagtctgggcccccggacccacgtgcaggcagggcacctccccaagcccaccctctgggctgaaccaggctctgtgatcacccaggggagtcctgtgaccctcaggtgtcaggggggccaggagacccaggagtaccgtctatatagagaaaagaaaacagcaccctggattacacggatcccacaggagcttgtgaagaagggccagttccccatcccatccatcacctgggaacatgcagggcggtatcgctgttactatggtagcgacactgcaggccgctcagagagcagtgaccccctggagctggtggtgacaggagcctacatcaaacccaccctctcagcccagcccagccccgtggtgaactcaggagggaatgtaaccctccagtgtgactcacaggtggcatttgatggcttcattctgtgtaaggaaggagaagatgaacacccacaatgcctgaactcccagccccatgcccgtgggtcgtcccgcgccatcttctccgtgggccccgtgagcccgagtcgcaggtggtggtacaggtgctatgcttatgactcgaactctccctatgagtggtctctacccagtgatctcctggagctcctggtcctaggtgtttctaagaagccatcactctcagtgcagccaggtcctatcgtggcccctgaggagaccctgactctgcagtgtggctctgatgctggctacaacagatttgttctgtataaggacggggaacgtgacttccttcagctcgctggcgcacagccccaggctgggctctcccaggccaacttcaccctgggccctgtgagccgctcctacgggggccagtacagatgctacggtgcacacaacctctcctccgagtggtcggcccccagcgaccccctggacatcctgatcgcaggacagttctatgacagagtctccctctcggtgcagccgggccccacggtggcctcaggagagaacgtgaccctgctgtgtcagtcacagggatggatgcaaactttccttctgaccaaggagggggcagctgatgacccatggcgtctaagatcaacgtaccaatctcaaaaataccaggctgaattccccatgggtcctgtgacctcagcccatgcggggacctacaggtgctacggctcacagagctccaaaccctacctgctgactcaccccagtgaccccctggagctcgtggtctcaggaccgtctgggggccccagctccccgacaacaggccccacctccacatctggccctgaggaccagcccctcacccccaccgggtcggatccccagagtggtctgggaaggcacctgggggttgtgatcggcatcttggtggccgtcatcctactgctcctcctcctcctcctcctcttcctcatcctccgacatcgacgtcagggcaaacactggacatcgacccagagaaaggctgatttccaacatcctgcaggggctgtggggccagagcccacagacagaggcctgcagtggaggtccagcccagctgccgatgcccaggaagaaaacctctatgctgccgtgaagcacacacagcctgaggatggggtggagatggacactcggagcccacacgatgaagacccccaggcagtgacgtatgccgaggtgaaacactccagacctaggagagaaatggcctctcctccttccccactgtctggggaattcctggacacaaaggacagacaggcggaagaggacaggcagatggacactgaggctgctgcatctgaagccccccaggatgtgacctacgcccagctgcacagcttgacccttagacggaaggcaactgagcctcctccatcccaggaagggccctctccagctgtgcccagcatctacgccactctggccatccactagcccagggggggacgcagaccccacactccatggagtctggaatgcatgggagctgcccccccagtggacaccattggaccccacccagcctggatctaccccaggagactctgggaacttttaggggtcactcaattctgcagtataaataactaatgtctctacaattttgaaataaagcaacagacttctcaataatcaatgaagtagctgagaaaactaagtcagaaagtgcattaaactgaatcacaatgtaaatattacacatcaagcgatgaaactggaaaactacaagccacgaatgaatgaattaggaaagaaaaaaagtaggaaatgaatgatcttggctttcctataagaaatttagggcagggcacggtggctcacgcctgtaattccagcactttgggaggccgaggcgggcagatcacgagttcaggagatcgagaccatcttggccaacatggtgaaaccctgtctctcctaaaaatacaaaaattagctggatgtggtggcagtgcctgtaatcccagctatttgggaggctgaggcaggagaatcgcttgaaccagggagtcagaggtttcagtgagccaagatcgcaccactgctctccagcctggcgacagagggagactccatctcaaattaaaaaaaaaaaaaaaaaagaaagaaaaaaaaaaaaaaaaaa

SEQ ID NO: 57317 - DNA, 3789 bp, Homo Sapiens; identical to SEQ ID NO: 28990

SEQ ID NO: 57318 - DNA, 2877 bp, Homo Sapiens
tccctccttttctttccaagtcacaaaattctcccctcccctaccccggagtttacggccctcctcctgtttccgatttcagcccggaaccggaagtgtagtgggcggggcccgtcggcggaaaacgcagcggagccagagccggacacggctgtggccgctgcctctacccccgccacggatcgccgggtagtaggactgcgcggctccaggctgagggtcggtccggaggcgggtgggcgcgggtctcacccggattgtccgggtggcaccgttcccggccccaccgggcgccgcgagggatcatgtctacagcctctgccgcctcctcctcctcctcgtcttcggccggtgagatgatcgaagccccttcccaggtcctcaactttgaagagatcgactacaaggagatcgaggtggaagaggttgttggaagaggagcctttggagttgtttgcaaagctaagtggagagcaaaagatgttgctattaaacaaatagaaagtgaatctgagaggaaagcgtttattgtagagcttcggcagttatcccgtgtgaaccatcctaatattgtaaagctttatggagcctgcttgaatccagtgtgtcttgtgatggaatatgctgaagggggctctttatataatgtgctgcatggtgctgaaccattgccatattatactgctgcccacgcaatgagttggtgtttacagtgttcccaaggagtggcttatcttcacagcatgcaacccaaagcgctaattcacagggacctgaaaccaccaaacttactgctggttgcaggggggacagttctaaaaatttgtgattttggtacagcctgtgacattcagacacacatgaccaataacaaggggagtgctgcttggatggcacctgaagtttttgaaggtagtaattacagtgaaaaatgtgacgtcttcagctggggtattattctttgggaagtgataacgcgtcggaaaccctttgatgagattggtggcccagctttccgaatcatgtgggctgttcataatggtactcgaccaccactgataaaaaatttacctaagcccattgagagcctgatgactcgttgttggtctaaagatccttcccagcgcccttcaatggaggaaattgtgaaaataatgactcacttgatgcggtactttccaggagcagatgagccattacagtatccttgtcagtattcagatgaaggacagagcaactctgccaccagtacaggctcattcatggacattgcttctacaaatacgagtaacaaaagtgacactaatatggagcaagttcctgccacaaatgatactattaagcgcttagaatcaaaattgttgaaaaatcaggcaaagcaacagagtgaatctggacgtttaagcttgggagcctcccgtgggagcagtgtggagagcttgcccccaacctctgagggcaagaggatgagtgctgacatgtctgaaatagaagctaggatcgccgcaaccacagcctattccaagcctaaacggggccaccgtaaaactgcttcatttggcaacattctggatgtccctgagatcgtcatatcaggcaacggacagccaagacgtagatccatccaagacttgactgtaactggaacagaacctggtcaggtgagcagtaggtcatccagtcccagtgtcagaatgattactacctcaggaccaacctcagaaaagccaactcgaagtcatccatggacccctgatgattccacagataccaatggatcagataactccatcccaatggcttatcttacactggatcaccaactacaggcaagaactagttgcagaactggaccaggatgaaaaggaccagcaaaatacatctcgcctggtacaggaacataaaaagcttttagatgaaaacaaaagcctttctacttactaccagcaatgcaaaaaacaactagaggtcatcagaagtcagcagcagaaacgacaaggcacttcatgattctctgggaccgttacattttgaaatatgcaaagaaagactttttttttaaggaaaggaaaaccttataatgacgattcatgagtgttagctttttggcgtgttctgaatgccaactgcctatatttgctgcatttttttcattgtttattttccttttctcatggtggacatacaattttactgtttcattgcataacatggtagcatctgtgacttgaatgagcagcactttgcaacttcaaaacagatgcagtgaactgtggctgtatatgcatgctcattgtgtgaaggctagcctaacagaacaggaggtatcaaactagctgctatgtgcaaacagcgtccattttttcatattagaggtggaacctcaagaatgactttattcttgtatctcatctcaaaatattaataatttttttcccaaaagatggtatataccaagttaaagacagggtattataaatttagagtgattggtggtatattacggaaatacggaacctttagggatagttccgtgtaagggctttgatgccagcatccttggatcagtactgaactcagttccatccgtaaaatatgtaaaggtaagtggcagctgctctatttaatgaaagcagttttaccggattttgttagactaaaatttgattgtgatacattgaacaaaatggaactcatttttttttaaggagtaaagatttttaattctgtgattgtgtgtatgtgtgttgaaactgtaaagcttttatgactctaatattaatctcttaaatgaaattaaaaggcaaaagaacatgattgagcttaaatgatcatttcttcctgcagtgattcttggattgttttctcatgtatttg

SEQ ID NO: 57319 - DNA, 1054 bp, Homo Sapiens
actgcagccgaaccctggtccctcctccacaatgtggcttctcctcactctctccttcctgctggcatccacagcagcccaggatggtgacaagttgctggaaggtgacgagtgtgcaccccactcccagccatggcaagtggctctctacgagcgtggacgctttaactgtggcgcttccctcatctccccacactgggtgctgtctgcggcccactgccaaagccgcttcatgagagtgcgcctgggagagcacaacctgcgcaagcgcgatggcccagagcaactacggaccacgtctcgggtcattccacacccgcgctacgaagcgcgcagccaccgcaacgacatcatgttgctgcgcctagtccagcccgcacgcctgaacccccagggtgactctgggggacccctggtctgtgggggcatcctgcagggcattgtgtcctggggtgacgtcccttgtgacaacaccaccaagcctggtgtctataccaaagtctgccactacttggagtggatcagggaaaccatgaagaggaactgactattctagcctatctcctgtgcccctgactgagcagaagcccccacagctggccagcagccccgcctgacatggaacagaacggagccatcccccaagaccctgtccaaggcccagatgttagccaaggacttgtcccacctgaggacaaagctggcgctcaaggtcacctgtttaatgccaagataacaaagcgctgatccaagttgctctgtaggaatttctgtgacttttttctggggtcaaagagaaaccccgagacactgtacactgttccttttcacccaccaccccgatccctaggtgaggagaagcggcttgaagcagggctccattcattcaacacacatgaccacccgtgtgatcttgaacaagaggcccaatctcacttcgccttggtttccttatctgtaaaatgagaccatcttattgctgacttcaaagggctgttgtgaggattaaatgagatgattcgtctgaactgattaaaatcgtgtctggcactga

SEQ ID NO: 57320 - DNA, 1983 bp, Homo Sapiens; identical to SEQ ID NO: 29728

SEQ ID NO: 57321 - DNA, 2706 bp, Homo Sapiens
atggagtttgtgcgggcgctgtggctgggcctggcgctggcgctggggccggggtccgcggggggccaccctcagccgtgcggcgtcctggcgcgcctcgggggctccgtgcgcctgggcgccctcctgccccgcgcgcctctcgcccgcgcccgcgcccgcgccgccctggcccgggccgccctggcgccgcggctgccgcacaacctgagcttggagctggtggtcgccgcgccccccgcccgcgaccccgcctcgctgacccgcggcctgtgccaggcgctggtgcctccgggcgtggcggccctgctcgcctttcccgaggctcggcccgagctgctgcagctgcacttcctggcggcggccaccgagacccccgtgctcagcctgctgcggcgggaggcgcgcgcgcccctcggagccccgaacccattccacctgcagctgcactgggccagccccctggagacgctgctggatgtgctggtggcggtgctgcaggcgcacgcctgggaagacgtcggcctggccctgtgccgcactcaggaccccggcggcctggtggccctctggacaagccgggctggccggcccccacagctggtcctggacctaagccggcgggacacgggagatgcaggactgcgggcacgcctggccccgatggcggcgccagtggggggtgaagcaccggtacccgcggcggtcctcctcggctgtgacatcgcccgtgcccgtcgggtgctggaggccgtacctcccggcccccactggctgttggggacaccactgccgcccaaggccctgcccaccgcggggctgccaccagggctgctggcgctgggcgaggtggcacgacccccgctggaggccgccatccatgacattgtgcaactggtggcccgggcgctgggcagtgcggcccaggtgcagccgaagcgagccctcctccccgccccggtcaactgcggggacctgcagccggccgggcccgagtccccggggcgcttcttggcacggttcctggccaacacgtccttccagggccgcacgggccccgtgtgggtgacaggcagctcccaggtacacatgtctcggcactttaaggtgtggagccttcgccgggacccacggggcgccccggcctgggccacggtgggcagctggcgggacggccagctggacttggaaccgggaggtgcctctgcacggcccccgcccccacagggtgcccaggtctggcccaagctgcgtgtggtaacgctgttggaacacccatttgtgtttgcccgtgatccagacgaagacgggcagtgcccagcggggcagctgtgcctggaccctggcaccaacgactcggccaccctggacgcactgttcgccgcgctggccaacggctcagcgccccgtgccctgcgcaagtgctgctacggctactgcattgacctgctggagcggctggcggaggacacgcccttcgacttcgagctgtacctcgtgggtgacggcaagtacggcgccctgcgggacggccgctggaccggcctggtcggggacctgctggccggccgggcccacatggcggtcaccagcttcagtatcaactccgcccgctcacaggtggtggacttcaccagccccttcttctccaccagcctgggcatcatggtgcgggcacgggacacggcctcacccatcggtgcctttatgtggcccctgcactggtccacgtggctgggcgtctttgcggccctgcacctcaccgcgctcttcctcaccgtgtacgagtggcgtagcccctacggcctcacgccacgtggccgcaaccgcagcaccgtcttctcctactcctcagccctcaacctgtgctacgccatcctcttcagacgcaccgtgtccagcaagacgcccaagtgccccacgggccgcctgctcatgaacctctgggccatcttctgcctgctggtgctgtccagctacacggccaacctggctgccgtcatggtcggggacaagaccttcgaggagctgtcggggatccacgaccccaagctgcaccacccggcgcagggcttccgcttcggcaccgtgtgggagagcagcgccgaggcgtacatcaagaagagcttccccgacatgcacgcacacatgcggcgccacagcgcgcccaccacgccccgcggcgtcgccatgctcacgagcgacccccccaagctcaacgccttcatcatggacaagtcgctcctggactacgaggtctccatcgacgccgactgcaaactgctgaccgtgggaaagcccttcgccattgagggctatgggatcggactgccccagaactcgccgctcacctccaacctgtccgagttcatcagccgctacaagtcctccggcttcatcgacctgctccacgacaagtggtacaagatggtgccttgcggcaagcgggtctttgcggttacagagaccctgcagatgagcatctaccacttcgcgggcctcttcgtgttgctgtgcctgggcctgggcagcgctctgctcagctcgctgggcgagcacgccttcttccgcctggcgctgccgcgcatccgcaaggggagcaggctgcagtactggctgcacaccagccagaaaatccaccgcgccctcaacacggagccaccagaggggtcgaaggaggagacggcagaggcggagcccaggtaa

SEQ ID NO: 57322 - DNA, 6608 bp, Homo Sapiens
gagcgggccgacggccattttgtgaagcggcgaaggaggtggtggctgcgttgggctccgggaagccgttcgggctggggctgtcggccgcggggcggaggcactcgcgcggggggtaattcggggtctgggttctggtgccgcgcagctttccccggattgacttggcctctacttcttgttaaggaaattcatctcttgttttatcaggtgtgtgtggtttcagcgcagcatggctgtggtcatccgtttgcaaggtctcccaattgtggcggggaccatggacattcgccacttcttctctggattgaccattcctgatgggggcgtgcatattgtagggggtgaactgggtgaggctttcatcgtttttgccactgatgaagatgcaaggcttggtatgatgcgcacaggtggtacaattaaagggtcaaaagtaacactattgttgagtagtaagacggaaatgcagaatatgattgaactgagtcgtaggcgttttgaaactgccaacttagatataccaccagcaaatgccagtagatcaggaccaccacctagctcaggaatgagtagcagggtaaacttgcccacaacagtatccaactttaataatccatcacccagtgtagttactgccaccacttctgttcatgaaagcaacaaaaacatacagacattttccacagccagcgtaggaacagctcctccaaatatgggggcttcctttgggagcccaacgtttagctcaactgttccaagcacagcctctccaatgaacacagtcccgccgccaccaattcctccaattccagcgatgccatctctgccaccaatgccatccattcccccaattccagttcctcctccagtacctacattgcctcctgtgcctcctgtgcccccgattcccccagttccttctgtgccacccatgaccccactgccacccatgtcgggcatgccgcccttgaatccgccacctgtggcacctctacctgctggaatgaatggctctggagcacctatgaatttgaacaataatctgaatcctatgtttcttggtccgttgaatcctgttaaccctatccagatgaactctcagagcagtgtgaagccactccccatcaaccctgatgatctgtatgtcagtgtgcatggaatgcccttttctgcaatggaaaatgatgtcagagatttttttcatgggctccgtgttgatgcagtgcatttgttgaaagatcatgtaggtcgaaataatgggaatggattggttaagtttctctcccctcaagatacatttgaagctttgaaacgaaacagaatgctgatgattcaacgctatgtggaagttagccctgccacagaaagacagtgggtagctgctggaggccatatcacttttaagcaaaatatgggaccttctggacaaactcatccccctcctcagacacttcccaggtcaaaatcgcccagtgggcagaaaagatcaaggtcaagatcaccacatgaggctggtttttgtgtttacttgaaagggctaccatttgaagcagaaaacaaacatgtcattgatttttttaaaaagctggatattgtggaagatagtatttatatagcttatggacccaatgggaaagcaactggcgaaggctttgtagagttcagaaatgaggctgactataaggctgctctgtgtcgtcataaacagtacatgggcaatcgctttattcaagttcatccaattactaagaaaggtatgctagaaaagatagatatgattcgaaaaagactgcagaacttcagctatgaccagagggaaatgatactaaatccagagggggatgtcaactctgccaaagtctgtgcccacataacaaatattccattcagcattacaaagatggatgttcttcagttcctagaaggaatcccagtggatgaaaatgctgtacatgttcttgttgataacaatgggcaaggtctaggacaggcattggttcagtttaaaaatgaagatgatgcacgtaagtctgaacgcttacaccgtaaaaaacttaatgggagagaagcttttgttcatgtagttaccctagaagatatgagagagattgagaaaaatccccctgcccaaggaaaaaagggattaaagatgcctgtgccaggtaatcctgcagttccaggaatgcccaatgcgggactgcccggtgtgggactgcccagtgcaggacttcccggtgcaggcctgcccagcacaggactgcctggttcagcaataaccagtgcaggactgcctggtgcgggaatgcccagtgcaggaatacctagtgcaggaggtgaagagcatgccttcctgactgtaggatcaaaggaagccaataatgggcctccatttaactttcctggtaattttggtggatcaaatgcctttgggccaccaatccctcctccaggattaggaggcggggcctttggtgatgctaggcctggtatgccttcagttggaaacagtggtttgcctggtctaggactggatgttccgggttttggaggtggaccaaacaatttaagtgggccatcgggatttggagggggccctcagaattttggaaatggccctggtagcttaggcggtcccccggggtttggaagtggccctcctggtcttggaagtgcccctgggcatttgggtgggccaccagcttttgggcctggccccggccccggccccggccctggcccaatccatattggtggtccccctggctttgcatctagttctggaaaaccaggaccgacagtaattaaagtgcaaaacatgccctttactgtgtctattgatgagattttagatttcttttatggctatcaagtaatcccaggctcagtgtgtttaaaatacaatgaaaaaggtatgcccacaggtgaagccatggtggcctttgagtctcgggatgaagccacagctgctgtcattgacttaaatgacaggcctataggttcaagaaaagtaaaacttgtattagggtagccattcacatcattttttatagggtagatcttcatattgctgtgattaatgcatccagattgttttcctagtatttccaggttagaacctgtggattgtttcaattgcatatagcttggtttccataacatagagcattggttgactgtttacagaagactcactcaccaggataaacattgctgtatgttacagtaaagctatctggagagaacacataaatgattttggcataccattagagaaaccatttgtaaaactcaaatgaccacataaagcttatcaaggagtctagattggttttgttttataccatatgggatgaagaaaatagaaatgtcagtagaactcattgagggtgctcttgccagctgctgaaaatagaagttggctactctcagaatttggtttaaagctggacagatttgctttgttatagggtaaagctttgtctaaagtcctcattttcttttaaaattgaataaaatttctgtatacagattcattgtatgtacctttattgcttcttaagggtccttgctgtatagacagtcctgcttcagaagttgctgctttgtttgtctaattgactcatttgtaaatgagcagaactgttttgttggtttttttccctaaatataaaagtccacacttcgtttgtgctataacctcaaactttgatttctaatgtcacacttaaaactgtgtggaataagacttttgccataaaaataaactatggagtcctttatctaccagagcctttttggtttgaccgccacgatttaggttagtcagtttaaaaattgttcatgttgtttggatggtatcgaaaaccagaaaccacttttaataatgtgtttaagatacttgatttgaagtccttttcatatggactaattgtagtatcaatttcctcctgtcccgattatgtgaaattttggcctttaaacaaagaggggcccattcataagaaagtgttatatctaggtttttaaaactgaagttgaaattatctttgttagcagtagtagtatagaataaaagatccgtatgctggttcgtagattgatacgtgttagtcctgttatttggaggctttttggcatagttgttcgatcaggagcctgtttactaaaagtcttcatacagagtacaagtgcagccgccagaggagaaaattgagattcttgaccctttcatactcttttctttggtattcaggacactaaggcaggaggaccacatgagttctggttggtaagtgtccttgtcatgaaaacacttgccttacaaggctctaattatgatttccctagtcagtgctctgaagatgtgtcacattatattataaacaatacggaaggggagataggtgagatgatatgaaaaacaaattttctcactgtcataaaaggctctaattatggttactttccttgtgatgaaaaacttggccttacagggctctagttatggttactttccctagtcaatgctctgaaaatgtgtcacattataaacaatacagaaggagagatagatgagagatcatgaaaaccaaattttatcttttacatggcccctttgtcttcgtttgaaacatccccaacatttcctacaaatcagcgtagttacaaaggggtcagtcttttaaaataagtatttcctattaaactatatatatatacagtgcctttttggtgttgtgagtcagtggaacactgaaatacagcggttgtgtaatttaagagtggcaacagtttcatttgataagatttgaaaaggctttttatcactacaatcttagaggattgacagtacaggatttttgtttaagagaaggattgtttagactcaagaggtgactatgttgtgggtcttttgataattcatgaatacagatttgctttgaccgatcactagatactgcctcctcaatttcaaaagcaatataacgtttgtatatgctgtttaatttaagttaatgttaagtaatcatttctcattccaaagacaatgcaaaaaacttcagcactgcttgagagttgtatttcagccacagatattttctccattggaaagctattttcattttagaaaaatgggttgtttgaagatgaaagtcttttatcttttttcacaatttattttggttatatgttcgtacattcttattaaatatttcatacactttattgcaactactttgttatttctacatcttagataaatgctgaaaaggaaaacgatttcattgttcatctaattaaataaattaaaagagcggtttgtgtagaaattggagagaactatgttttatatgaatcacaacagtgctcgttgtggactgtaattaaatgctttgccctctggaacttgatttttgtgtatctgagatttattaacagtgctaactgctaaggatactgtttatcttgttctgggcattggagtttcagtttttaaaaaattcttgaaaatgtattctgtgaaactactcatacctctcttcctgcgaattttctcctaagaactaggtttggggtagaaatgaattgacattattttctcatttgctttgtatggtatgaaggatttgtaaagctttgctcaaagttgtgtgcatttgtaaacactatcatgatattttcaattttatgtgtaaattttattgtctgtttttggtgactctgacattaatggaagagaatattttccattagatttaattttttttcctctcccttctgattttttttttattggtgttcatttttcttttgatttaaaggattagagaaatctacaaatgtatgtcataaataagcaaatttgtaaacttttctgaactttagtgaaacatttagttcacaagcataatttggaggtgtgttctgtgtttacacagtagtttggatgtacaattattattagtggctttttaaaaaatgaaacagtgttaagtgaaatgtagttcctagctttgtactccaagttgtcaaagcatcaacaatgaaaattcgattaggaaactttatttaaaatttcaggtagtaatattcagtgtagttaaggccagtcttaacccactggatgaaaatctaggactgtatggaagtaagcaaacattacatttttaggtggaaatagtcagccttgcataaaaacaaggatgcgtgaaagccttaaattccagctcccttttactggagtctgtggttgtgtacaggtatgggccaagtgtaaaatctcatcaattttaagaacactcgggaaatgagtaaagaaaatgtaaaattgctgctagtcaaatcttttggaaagaatttctggaagtggtcactttaaaaattattttccacccttgcaaaattgccacatttaaattgttttactggcagttctatagtagtccagactttagaaaccaaacacaacaaaatggcttgttgccaatatggccacaacattgccagcaaatactgccttggcatcactcagcagaggtttttgtttataaagatgaagtcttgaatactgttcaataaacttgtcaaaaaataaaaaaaaaaaa

SEQ ID NO: 57323 - DNA, 6029 bp, Homo Sapiens
cacgggggctcccgcgtggccgtctcggcgcctgcgtgacctccccgccggcgggatgtggcgactacgtcgggccgctgtggcctgtgaggtctgccagtctttagtgaaacacagctctggaataaaaggaagtttaccactacaaaaactacatctggtttcacgaagcatttatcattcacatcatcctaccttaaagcttcaacgaccccaattaaggacatcctttcagcagttctcttctctgacaaaccttcctttacgtaaactgaaattctctccaattaaatatggctaccagcctcgcaggaatttttggccagcaagattagctacgagactcttaaaacttcgctatctcatactaggatcggctgttgggggtggctacacagccaaaaagacttttgatcagtggaaagatatgataccggaccttagtgaatataaatggattgtgcctgacattgtgtgggaaattgatgagtatatcgattttgagaaaattagaaaagcccttcctaattcagaagaccttgtaaagttagcaccagactttgacaagattgttgaaagccttagcttattgaaggacttttttacctcaggtcacaaattggttagtgaagtcataggagcttctgacctacttctcttgttaggttctccggaagaaacggcgtttagagcaacagatcgtggatctgaaagtgacaagcattttagaaagggtctgcttggtgagctcattctcttacaacaacaaattcaagagcatgaagaggaagcgcgcagagccgctggccaatatagcacgagctatgcccaacagaagcgcaaggtgtcagacaaagagaaaattgaccaacttcaggaagaacttctgcacactcagttgaagtatcagagaatcttggaacgattagaaaaggagaacaaagaattgagaaaattagtattgcagaaagatgacaaaggcattcatcatagaaagcttaagaaatctttgattgacatgtattctgaagttcttgatgttctctctgattatgatgccagttataatacgcaagatcatctgccacgggttgttgtggttggagatcagagtgctggaaagactagtgtgttggaaatgattgcccaagctcgaatattcccaagaggatctggggagatgatgacacgttctccagttaaggtgactctgagtgaaggtcctcaccatgtggccctatttaaagatagttctcgggagtttgatcttaccaaagaagaagatcttgcagcattaagacatgaaatagaacttcgaatgaggaaaaatgtgaaagaaggctgtaccgttagccctgagaccatatccttaaatgtaaaaggccctggactacagaggatggtgcttgttgacttaccaggtgtgattaatactgtgacatcaggcatggctcctgacacaaaggaaactattttcagtatcagcaaagcttacatgcagaatcctaatgccatcatactgtgtattcaagatggatctgtggatgctgaacgcagtattgttacagacttggtcagtcaaatggaccctcatggaaggagaaccatattcgttttgaccaaagtagacctggcagagaaaaatgtagccagtccaagcaggattcagcagataattgaaggaaagctcttcccaatgaaagctttaggttattttgctgttgtaacaggaaaagggaacagctctgaaagcattgaagctataagagaatatgaagaagagttttttcagaattcaaagctcctaaagacaagcatgctaaaggcacaccaagtgactacaagaaatttaagccttgcagtatcagactgcttttggaaaatggtacgagagtctgttgaacaacaggctgatagtttcaaagcaacacgttttaaccttgaaactgaatggaagaataactatcctcgcctgcgggaacttgaccggaatgaactatttgaaaaagctaaaaatgaaatccttgatgaagttatcagtctgagccaggttacaccaaaacattgggaggaaatccttcaacaatctttgtgggaaagagtatcaactcatgtgattgaaaacatctaccttccagctgcgcagaccatgaattcaggaacttttaacaccacagtggatatcaagcttaaacagtggactgataaacaacttcctaataaagcagtagaggttgcttgggagaccctacaagaagaattttcccgctttatgacagaaccgaaagggaaagagcatgatgacatatttgataaacttaaagaggccgttaaggaagaaagtattaaacgacacaagtggaatgactttgcggaggacagcttgagggttattcaacacaatgctttggaagaccgatccatatctgataaacagcaatgggatgcagctatttattttatggaagaggctctgcaggctcgtctcaaggatactgaaaatgcaattgaaaacatggtgggtccagactggaaaaagaggtggttatactggaagaatcggacccaagaacagtgtgttcacaatgaaaccaagaatgaattggagaagatgttgaaatgtaatgaggagcacccagcttatcttgcaagtgatgaaataaccacagtccggaagaaccttgaatcccgaggagtagaagtagatccaagcttgattaaggatacttggcatcaagtttatagaagacattttttaaaaacagctctaaaccattgtaacctttgtcgaagaggtttttattactaccaaaggcattttgtagattctgagttggaatgcaatgatgtggtcttgttttggcgtatacagcgcatgcttgctatcaccgcaaatactttaaggcaacaacttacaaatactgaagttaggcgattagagaaaaatgttaaagaggtattggaagattttgctgaagatggtgagaagaagattaaattgcttactggtaaacgcgttcaactggcggaagacctcaagaaagttagagaaattcaagaaaaacttgatgctttcattgaagctcttcatcaggagaaataaattaaaatcgtactcataatcagctctgcatacatctgaagaacaaaaacatcaacgtcttttgtccagcctctttttcttctgctgttccacctttctaaacatacaataaagtcatgggataaaaataatcgatgtatgttacgggcgctttaaccatcagctgcctctcgaatggaagaacagtggtaatggattaacatcctattttgttgtactaaagtgacaaatcggaataatataattggtatggccattaggttcagtccttgaagataagaagcttgttctctgtttgttgtcttatttgtggtggcactcgtttaatggattaactgaggttgctcaatgttcagtttcttttccagaaatacaatgctaggtgttttgaaataaaacttatatagcaattgtttaaagttatcaattgtatataaaatcacagtagcctgctaaatcattgtatgtgtctgtagtattctattcccagaaactatttgaccatgataattcagtttatattcaccacatgaaagaaaaatgggtaacagaagaacccctaaaacaggttaatttggattgtaacgttcagtgaaagaaatttcaacccttcatagccagcgaagaaatttgccttggaagccaagtcagtaccagcttacctatttgattcagttgctgttttctcactctctatatccatttgaaattgatttattttagatgttgtatacttacgttaggctttctgttaatagtggtttttctcctgttgacagagccaccggattatgacacaggatgaggaagattaaggataatcaattgactaatttcatttagaatattatcaaacatttcaactaggtatcagaaaaaggctttctttcataagactattttaaatagaaattatttcaacaattaaagtaatgttgaccatccccctctcagctgaataaagaaaaatttagttcaatttattgcaatttaattacaatactaccttcacaacattttcatgtgttttaaataaatattttttaattggctaaaggacattcaagcaaagaaatgctttctttacttaaaatgtctatctcatttgctgccttttcactaagcctttactttgttaataaaagtgtccattgtgtgatgtttttgattttacagtttgctaaatcttattttcttggagttgctttttggtaacagccccattgctactccccattttattgttttacatcaatgcatgcttcgttgtgatccctcaagatgtaacacttggtatgctcggttgaggatatgaaaaaatacttccgaaaccaggaattcagtgtatgtttgttttatactgtttgataagaaaagtaggtccagccttaagcagcacagatgcgctggtagatgcatagtcaggaactttttttatttcttttaggtctagggacaggagtgaatagaaagggaggagagctctattatgttctatacacagattaggagatgaccttactgggtacacccctctaaccagtgcttacaggttaatgcatgttaatgaatatttttgcagttgtaaagcataacaattacaactacacatctatttctaaagaataaaacaggaccatatttatttacttctgtcaactatagaaagaaagaccttcagctgtatttccacagatttctcccaaggaaaaggctaatattagtcactactgttatcacatccctttgtataagttttaaaaagagatggagggagatcttcatttctttgaggagatcagtattgtaacgtatgtgaatagatgataacaattaatattactaaaagtcccacatgagagtcctgacgccctctccatgccccacagtaatgtggcttctttcatgggtttttttttcttctttttagctgatctcatcctaagcatgctttatttttccttgaaagctaggtatttatcaactgcagatgttattgaaagaaaataaaattcagtctcaagagtaaaccctgtgtcttgtgtctgtagttcaaaagtcagaaatgattctaatttaaacaaaaagatattaaatatacagaagttaaattcgaactagccacagaatcatttgtttttatgtcagaatttgcaaagagtggagtggacaaagctctgtatggaagactgaacaactgtaaatagatgatatccaaacttaatttggctaggacttcaattttaaaaatcagtgtacctaggcagtgcacagcacgaaataagtggcccttgcagcttccccgtttaacccactgtgctatagttgcgggtggaacagtcaacctttctagtagtttatgatattgccctctttgtattcccattttccacagttttttccgcagacttctttctgcaaattattcagcctccaaatgcaaatgaatgatataaaaataagtagggaacatggcagagagtggtgcttcccagcctcacaatgtgggaatttgacataggatgagagtcagagtataggtttaaaagataaaatctttagttaataattttgtatttatttattctagatgtatgtatctgaggaaagaaatctggtatttttgctttccaataaaggggatcaaagtaatggtttttctctcagttctctaagctggtctatgttatagctctagcagtatggaaatgtgctttaaaatatgcttaccttttgaatgatcatggctatatgttgttgagatatttgaaacttaccttgttttcacttgtgcactgtgaatgaactttgtattatttttttaaaaccttcacattacgtgtagatattattgcaacttatattttgcctgtgcttgatcaaaggtcatttgtgtagatgagtaattaaaaaatatttaaatcac

SEQ ID NO: 57324 - DNA, 3906 bp, Homo Sapiens
gagatcggtggtgctgaagggcagggatcttattccaccttctgaagcttctgtcgaaccagttgtaaggagaatggagagagcagtgagagtggagtccggggtcctggtcggggtggtctgtctgctcctggcatgccctgccacagccactgggcccgaagttgctcagcctgaagtagacaccaccctgggtcgtgtgcgaggccggcaggtgggcgtgaagggcacagaccgccttgtgaatgtctttctgggcattccatttgcccagccgccactgggccctgaccggttctcagccccacacccagcacagccctgggagggtgtgcgggatgccagcactgcgcccccaatgtgcctacaagacgtggagagcatgaacagcagcagatttgtcctcaacggaaaacagcagatcttctccgtttcagaggactgcctggtcctcaacgtctatagcccagctgaggtccccgcagggtccggtaggccggtcatggtatgggtccatggaggcgctctgataactggcgctgccacctcctacgatggatcagctctggctgcctatggggatgtggtcgtggttacagtccagtaccgccttggggtccttggcttcttcagcactggagatgagcatgcacctggcaaccagggcttcctagatgtggtagctgctttgcgctgggtgcaagaaaacatcgcccccttcgggggtgacctcaactgtgtcactgtctttggtggatctgccggtgggagcatcatctctggcctggtcctgtccccagtggctgcagggctgttccacagagccatcacacagagtggggtcatcaccaccccagggatcatcgactctcacccttggcccctagctcagaaaatcgcaaacaccttggcctgcagctccagctccccggctgagatggtgcagtgccttcagcagaaagaaggagaagagctggtccttagcaagaagctgaaaaatactatctatcctctcaccgttgatggcactgtcttccccaaaagccccaaggaactcctgaaggagaagcccttccactctgtgcccttcctcatgggtgtcaacaaccatgagttcagctggctcatccccaggggctggggtctcctggatacaatggagcagatgagccgggaggacatgctggccatctcaacacccgtcttgaccagtctggatgtgccccctgagatgatgcccaccgtcatagatgaatacctaggaagcaactcggacgcacaagccaaatgccaggcgttccaggaattcatgggtgacgtattcatcaatgttcccaccgtcagtttttcaagataccttcgagattctggaagccctgtctttttctatgagttccagcatcgacccagttcttttgcgaagatcaaacctgcctgggtgaaggctgatcatggggccgagggtgcttttgtgttcggaggtcccttcctcatggacgagagctcccgcctggcctttccagaggccacagaggaggagaagcagctaagcctcaccatgatggcccagtggacccactttgcccggacaggggaccccaatagcaaggctctgcctccttggccccaattcaaccaggcggaacaatatctggagatcaacccagtgccacgggccggacagaagttcagggaggcctggatgcagttctggtcagagacgctccccagcaagatacaacagtggcaccagaagcagaagaacaggaaggcccaggaggacctctgaggccaggcctgaaccttcttggctggggcaaaccactcttcaagtggtggcagagtcccagcacggcagcccgcctctccccctgctgagactttaatctccaccagcccttaaagtgtcggccgctctgtgactggagttatgctcttttgaaatgtcacaaggccgcctcccacctctggggcattgtacaagttcttccctctccctgaagtgcctttcctgctttcttcgtggtaggttctagcacattcctctagcttcctggaggactcactcccccaggaagccttccctgccttctctgggctgtgcggccccgagtctgcgtccattagagcacagtccacccgaggctagcaccgtgtctgtgtctgtctccccctcagaggagctctctcaaaatggggattagcctaaccccactctgtcacccacaccaggatcgggtgggacctggagctagggggtgtttgctgagtgagtgagtgaaacacagaatatgggaatggcagctgctgaacttgaacccagagccttcaggtgccaaagccatactcaggcccccaccgacattgtccaccctggccagaagggtgcatgccaatggcagagacctgggatgggagaagtcctggggcgccaggggatccagcctagagcagaccttagcccctgactaaggcctcagactagggcgggaggggtctcctcctctctgctgcccagtcctggcccctgcacaagacaacagaatccatcagggccatgagtgtcacccagacctgaccctcaccaattccagccctgaccctcaggacgctggatgccagctcccagccccagtgccgggtcctccctcccttcctggcttggggagaccagtttctggggagcttccaagagcacccaccaagacacagcaggacaggccaggggagggcatctggaccagggcatccgtcgggctattgtcacagagaaaagaagagacccacccactcgggctgcaaaaggtgaaaagcaccaagaggttttcagatggaagtgagaggtgacagtgtgctggcagccctcacagccctcgcttgctctccctgccgcctctgcctgggctcccactttggcagcacttgaggagcccttcaacccgccgctgcactgtaggagcccctttctgggctggccaaggccggagccagctccctcagcttgcggggaggtgcggagggagaggggcgggcaggaaccggggctgcgcgcagcgcttgcgggccagagtgagttccgggtgggcgtgggctcggcggggccccactcagagcagctggccggccccaggcagtgagggccttagcacctgggccagcagctgctgtgctcgatttctcgctgggccttagctgcctccccgcggggcagggctcgggacctgcagccctccatgcctgaccctccccccaccccccgtgggctcctgtgcggccggagcctccccaaggagcgccgccccctgctccacagcgcccagtcccatcgaccacccaagggctgaggagtgcgggtgcacagcgcgggactggcaggcagctccacctgctgccccagtgctggatccactgggtgaagccagctgggctcctgagtctggtggggacttggagaacctttatgtctagctaagggattgtaaatacaccgatgggcactctgtatctagctcaaggtttgtaaacacaccaatcagcaccctgtgtctagctcagtgtttgtgaatgcaccaatccacactctgtatctggctactctggtggggacttggagaacctttgtgtccacactctgtatctagctaatctagtggggatgtggagaacctttgtgtctagctcagggatcgtaaacgcaccaatcagcaccctgtcaaaacagaccacttgactctctgtaaaatggaccaatcagcaggatgtgggtggggcgagacaagagaataaaagcaggctgcctgagccagcagtgacaacccccctcgggtcccctcccacgccgtggaagctttgttctttcgctctttgcaataaatcttgctactgcccaaaaaaaaaaaaaaaaaa

SEQ ID NO: 57325 - DNA, 1360 bp, Homo Sapiens
gcgccctggagaacgcgtcggggctgagccggggtccagcagccgccgctatggacatcccgccgctggccggcaagatcgcggcgctgtcgctgagcgccctcccggtgtcctacgcgctcaaccacgtctcggcgctctcgcaccccctgtgggtggcattgatgagcgccctaatcctgggtctgcttttcgtggcggtctacagcttgtcccatggcgaggtctcctatgacccactctatgctgtcttcgctgtcttcgccttcacctcggttgtggacctcatcatcgctcttcaggaagacagctatgtggtgggcttcatggagttctacaccaaggagggagagccatacctgcgcacagcgcacggagtcttcatctgctactgggatggcactgttcactacctcctctacctggccatggccggcgccatctgcagaaggaagagataccggaattttggactctactggctgggttccttcgccatgagcatcctggtgttccttacaggaaacattcttggcaaatacagctccgagatcaggcctgccttcttcctcaccatcccctacctgctggtgccatgctgggctggcatgaaggtcttcagccagccccgggcgctaacccgctgcaccgccaacatggtgcaagaggaacaaagaaagggactcctgcagcgtccggctgacctggcccttgtcatatatctcatccttgctggcttcttcactctgttccggggcctggtggtgcttgattgccccacagatgcctgctttgtctatatctaccagtatgagccatacctgcgggaccctgtggcctaccctaaggtgcagatgctgatgtacatgttttatgtcctgcctttctgcggcctggctgcctatgctctcaccttccctggttgctcctggcttccagactgggccttggtgtttgctggaggcatcggccaggcacagttctcgcacatgggggcttccatgcacctgcgcacacccttcacctaccgttgccttcagtggcccgcattcttccaccagccaccaccctccgaccccctagccctccacaagaagcagcattgagagagctgtggactcaggacccaggactctgtttacgtgcccagtcagccctacctggggaagcgggggttgggtgttttagagacaggagggacatctccgggtgtctttagtcttggctatggtagtttcagctgtcaccatgctccaactcccacacaaacgcttctaccccttccagaacttacccatcatccccccatggatcctttcagtaaaaaccctttcaatttccaaaaaaaaaaaaaaaaaaa

SEQ ID NO: 57326 - DNA, 5699 bp, Homo Sapiens; identical to SEQ ID NO: 30108

SEQ ID NO: 57327 - DNA, 2966 bp, Homo Sapiens
cgcccgagccgcgcgcggagctgccgggggctccttagcacccgggcgccggggccctcgcccttccgcagccttcactccagccctctgctcccgcacgccatgaagtcgccgttctaccgctgccagaacaccacctctgtggaaaaaggcaactcggcggtgatgggcggggtgctcttcagcaccggcctcctgggcaacctgctggccctggggctgctggcgcgctcggggctggggtggtgctcgcggcgtccactgcgcccgctgccctcggtcttctacatgctggtgtgtggcctgacggtcaccgacttgctgggcaagtgcctcctaagcccggtggtgctggctgcctacgctcagaaccggagtctgcgggtgcttgcgcccgcattggacaactcgttgtgccaagccttcgccttcttcatgtccttctttgggctctcctcgacactgcaactcctggccatggcactggagtgctggctctccctagggcaccctttcttctaccgacggcacatcaccctgcgcctgggcgcactggtggccccggtggtgagcgccttctccctggctttctgcgcgctacctttcatgggcttcgggaagttcgtgcagtactgccccggcacctggtgctttatccagatggtccacgaggagggctcgctgtcggtgctggggtactctgtgctctactccagcctcatggcgctgctggtcctcgccaccgtgctgtgcaacctcggcgccatgcgcaacctctatgcgatgcaccggcggctgcagcggcacccgcgctcctgcaccagggactgtgccgagccgcgcgcggacgggagggaagcgtcccctcagcccctggaggagctggatcacctcctgctgctggcgctgatgaccgtgctcttcactatgtgttctctgcccgtaatttatcgcgcttactatggagcatttaaggatgtcaaggagaaaaacaggacctctgaagaagcagaagacctccgagccttgcgatttctatctgtgatttcaattgtggacccttggatttttatcattttcagatctccagtatttcggatattttttcacaagattttcattagacctcttaggtacaggagccggtgcagcaattccactaacatggaatccagtctgtgacagtgtttttcactctgtggtaagctgaggaatatgtcacattttcagtcaaagaaccatgattaaaaaaaaaaagacaacttacaatttaaatccttaaaagttacctcccataacaaaagcatgtatatgtattttcaaaagtatttgatatcttaacaatgtgttaccattctatagtcatgaaccccttcagtgcattttcatttttttattaacagcaactaaaattttatatattgtaaccagtgttaaaagtcttaaaaaacaatggtattaattgtccctacatttgtgcttggtggccctattttttttttttagagaggccttgagacatacaggtcttttaaaatacagtagaaacaccactgtttacgattatacgatggacattcataaaaagcataatttcttaccctattcattttttggtgaaacctgattcattgattttatatcattgccgatgtttagttcatttctttgccaattgatctaagcatagcctgaattatgatgttcctcagagaagtgaggtgggaaatatgaccaggtcaggcagttggaggggcttccccagccaccatcggggagtacttgctgcctcaggtggagacctgaagctgtaactagatgcagagcaagatatgactatagcccacaacccaaagaagcaaaaattcgtttttatcttttgaaatccagtttcttttgtattgagtcaagggtgtcagtaggaatcaaaagttgggggtgggttgcaaaatgttctttcagtttttagaacctccattttataaaagaattatcctatcaatggattctttagtggaaggatttatgcttctttgaaaaccagtgtgtgactcactgtagagccatgtttactgtttgactgtgtggcacaggggggcatttggcacagcaaaaagcccacccaggacttagcctcagttgacgatagtaacaatggccttaacatctaccttaacagctacctattacagccgtattctgctgtccgtggagacggtaagatcttaggttccaagattttacttcaaattacaccttcaaaactggagcagcatatagccgaaaaggagcacaactgagcactttaatagtaatttaaaagttttcaagggtcagcaatatgatgactgaaagggaaaagtggaggaaacgcagctgcaactgaagcggagactctaaacccagcttgcaggtaagagctttcacctttggtaaaagaacagctggggaggttcaaggggtttcagcatctctggagttcctttgtatctgacaatctcaggactccaaggtgcaaagcctgctgcatttgcgtgatctcaagacctccagccagaagtcccttccaaatataagagtactcatgtttatttatttccaactgagcagcaacctcctttgtttcacttatgttttttccagtatctgagataatataaagctgggtaattttttatgtaattttttggtatagcaaaactgtgaaaaagccaaattaggcatacaaggagtatgatttaacagtatgacatgatgaaaaaaatacagttgtttttgaaatttaacttttgtttgtaccttcaatgtgtaagtacatgcatgttttattgtcagaggaagaacatgttttttgtattctttttttggagaggtgtgttaggataattgtccagttaatttgaaaaggccccagatgaatcaataaatataattttatagtaaaaaaaaaaaaaaaaaaaaaaaaa

SEQ ID NO: 57328 - DNA, 4253 bp, Homo Sapiens
ggtgcatgccgggacggcggtgggtggtgcatgcgctcgcatcatggcggctgagtgggcttctcgtttctggctttgggctacgctgctgattcctgcggccgcggtctacgaagaccaagtgggcaagtttgattggagacagcaatatgttgggaaggtcaagtttgcctccttggaattttcccctggatccaagaagttggttgtagccacagagaagaatgtgattgcagcattaaattcccgaactggggagatcttgtggcgccatgttgacaagggcacggcagaaggggctgtggatgccatgctgctgcacggacaggatgtgatcactgtgtccaatggaggccgaatcatgcgttcctgggagactaacatcgggggcctgaactgggagataaccctggacagtggcagtttccaggcacttgggctggttggcctgcaggagtctgtaaggtacatcgcagtcctgaagaagactacacttgccctccatcacctctccagtgggcacctcaagtgggtggaacatctcccagaaagtgacagcatccactaccagatggtgtattcttacggctctggggtggtgtgggccctcggagttgttcccttcagccatgtgaacattgtcaagtttaatgtggaagatggagagattgttcagcaggttagggtttcaactccgtggctgcagcacctgtctggagcctgtggtgtggtggatgaggctgtcctggtgtgtcctgacccgagctcacgttccctccaaactttggctctggagacggaatgggagttgagacagatcccactgcagtctctcgacttagaatttggaagtggattccaaccccgggtcctgcctacccagcccaacccagtggacgcttcccgggcccagttcttcctgcacttgtccccaagccactatgctctgctgcagtaccattatggaacgctgagtttgcttaaaaacttcccacagactgccctagtgagctttgccaccactggggagaagacggtggctgcagtcatggcctgtcggaatgaagtgcagaaaagtagcagttctgaagatgggtcaatggggagcttttcggagaagtctagttcaaaggactctctggcttgcttcaatcagacctacaccattaacctatacctcgtggagacaggtcggcggctgctggacaccacgataacatttagcctggaacagagcggcactcggcctgagcggctgtatatccaggtgttcttgaagaaggatgactcagtgggctaccgggctttggtgcagacagaggatcatctgctacttttcctgcagcagttggcagggaaggtggtgctgtggagccgtgaggagtccctggcagaagtggtgtgcctagagatggtggacctccccctgactggggcacaggccgagctggaaggagaatttggcaaaaaggcagatggcttgctggggatgttcctgaaacgcctctcgtctcagcttatcctgctgcaagcatggacttcccacctctggaaaatgttttatgatgctcggaagccccggagtcagattaagaatgagatcaacattgacaccctggccagagatgaattcaacctccagaagatgatggtgatggtaacagcctcaggcaagctttttggcattgagagcagctctggcaccatcctgtggaaacagtatctacccaatgtcaagccagactcctcctttaaactgatggtccagagaactactgctcatttcccccatcccccacagtgcaccctgctggtgaaggacaaggagtcgggaatgagttctctgtatgtcttcaatcccatttttgggaagtggagtcaggtagctcccccagtgctgaagcgccccatcttgcagtccttgcttctcccagtcatggatcaagactacgccaaggtgttgctgttgatagatgatgaatacaaggtcacagcttttccagccactcggaatgtcttgcgacagctacatgagcttgccccttccatcttcttctatttggtggatgcagagcagggacggctgtgtggatatcggcttcgaaaggatctcaccactgagctgagttgggagctgaccattcccccagaagtacagcggatcgtcaaggtgaaggggaaacgcagcagtgagcacgttcattcccagggccgtgtgatgggggaccgcagtgtgctctacaagagcctgaaccccaacctgctggccgtggtgacagagagcacagacgcgcaccatgagcgcacctttattggcatcttcctcattgatggcgtcactgggcgtatcattcactcctctgtgcagaagaaagccaaaggccctgtccatatcgtgcattcagagaactgggtggtgtaccagtactggaacaccaaggctcggcgcaacgagtttaccgtactggagctctatgagggcactgagcaatacaacgccaccgccttcagctccctggaccgcccccagctgccccaggtcctccagcagtcctatatcttcccgtcctccatcagtgccatggaggccaccatcaccgaacggggcatcaccagccgacacctgctgattggactaccttctggagcaattctttcccttcctaaggctttgctggatccccgccgccccgagatcccaacagaacaaagcagagaggagaacttaatcccgtattctccagatgtacagatacacgcagagcgattcatcaactataaccagacagtttctcgaatgcgaggtatctacacagctccctcgggtctggagtccacttgtttggttgtggcctatggtttggacatttaccaaactcgagtctacccatccaagcagtttgacgttctgaaggatgactatgactacgtgttaatcagcagcgtcctctttggcctggtttttgccaccatgatcactaagagactggcacaggtgaagctcctgaatcgggcctggcgataaagaacaaagactgtgcctaaaagtggagagccaggggagtgtgggtcagataagcagctacagctgcagtttggtggattggtggagtatgtgtgtgtgtcagtgctcagctaagaactgtagggaagatggatgaccttcacgcagaactccttttgggatatacatgatgcagaaaggatcctacatggagagagacagaactctctcagctgacactctcagagattcctgatgggctttctcttgaagtccaaaggcgtctgcattgtttcctttctttgcccatccatgaatgttctgttttgttttttttaataagaattccggctgatttttgtgaggcctgtttaaattgactttactttgccttttgtgtttctcaattttatctagaaatctttctgactttttccatctcttgcttcaaagtaagaggggaactctccttgccgactccaccttataggtacatttggtgttttgcactgggaagaaataggatccatccttagctgaggcttgaggactgatccagcctctcatggcttccctccaaagtaacttagggttgagggatctatatgtgatgtcaaaacttactttaaacctctagtttcgtgctgtcatttattaggctgggccaccaaatctttgtttcaatttatcagaagccaagtgcatactagcgtcttgtttgttgcccattgcctatacttttcacctgagatgtgtgagttggggccttttaaaaactactgaattgtctgagccttgaagacatttccagggagaagagataatctctcatttcacccacaggctggtctaatcataacctagttaaagatgtccttgtttaagaaccccattatttatttttagtttttaatataaattaacatgtgggtcattatatttctccttaaatgaggaaattttaaattttattgatctaacctttgaagctttaaaaaaggagaaagagggtaggggtgggaaactggcatactgtgtgtatagcactgccgattggctaggccactgtgtctctgctacaaattaaagaaatcctaaaagttttccttggtcatagagttggggaatgacagaatttttctttgttgtgaaatgtatgtacagagtagaccatctctagccctgtggtgaaagaggtacactcgaatgtttgcataaagcaagtgacaaatgaaaaaaaaaaaaaaaa

SEQ ID NO: 57329 - DNA, 6010 bp, Homo Sapiens
tctcggctgccgctgctgccgttggctcttattctcctcctcctcctcctctctcctcctctctgcttctctctgctcctctctcctcctctctcctcctcctcctcctccacctcctcctccttctccccctctttctccccctctttctctcttctttctcccccgtccccccgccccctccccccaggcctgatgagcaggtctcgagcctccatccatcgggggagcatccccgcgatgtcctatgcccccttcagagatgtacggggaccctctatgcaccgaacccaatacgttcattccccgtatgatcgtcctggttggaaccctcggttctgcatcatctcggggaaccagctgctcatgctggatgaggatgagatacaccccctactgatccgggaccggaggagcgagtccagtcgcaacaaactgctgagacgcacagtctccgtgccggtggaggggcggccccacggcgagcatgaataccacttgggtcgctcgaggaggaagagtgtcccaggggggaagcagtacagcatggagggtgcccctgctgcgcccttccggccctcgcaaggcttcctgagccgacggctaaaaagctccatcaaacgaacgaagtcacaacccaaacttgaccggaccagcagctttcgccagatcctgcctcgcttccgaagtgctgaccatgaccgggcccggctgatgcaaagctttaaggagtcacactctcatgagtccttgctgagtcctagcagtgcagctgaggcattggagctcaacttggatgaagattccattatcaagccagtgcacagctccatcctgggccaggagttctgttttgaggtaacaacttcatcaggaacaaaatgctttgcctgtcggtctgcggccgaaagagacaaatggattgagaatctgcagcgggcagtaaagcccaacaaggacaacagccgccgggtagacaatgtgctaaagctgtggatcatagaggcccgggagctgccccccaagaagcggtactactgtgagctctgcctggatgacatgctgtatgcacgcaccacctccaagccccgctctgcctctggggacaccgtcttctggggcgagcacttcgagtttaacaacctgccggctgtccgtgccctgcggctgcatctgtaccgtgactcagacaaaaagcgcaagaaggacaaggcaggctatgtcggcctggtgactgtgccagtggccaccctggctgggcgccacttcacagagcagtggtaccctgtaaccctgccaacaggcagtgggggatctgggggcatgggttcgggagggggagggggctcggggggtggctcagggggcaagggcaaaggaggttgcccggctgtgcggctgaaagcacgttaccagacaatgagcatcttgcccatggagctatataaagagtttgcagagtatgtcaccaaccattatcggatgctgtgtgcagtcttggagcccgccctgaatgtcaaaggcaaggaggaggttgccagtgcactagttcacatcctgcagagtacaggcaaggccaaggacttcctttcagacatggccatgtctgaggtagaccggttcatggaacgggagcacctcatattccgcgagaacacgcttgccactaaagccatagaagagtatatgagactgattggtcagaaatacctcaaggatgccattggagaattcatccgtgctctgtatgaatctgaggaaaactgcgaggtagaccctatcaagtgcacagcatccagtttggcagagcaccaggccaacctgcgaatgtgctgtgagttggccctgtgcaaggtggtcaactcccactgcgtgttcccgagggagctgaaggaggtgtttgcttcgtggcggctgcgctgcgcagagcgaggccgggaggacatcgcagacaggcttatcagcgcctcactcttcctgcgcttcctctgcccagcgattatgtcgcccagtctctttgggcttatgcaggagtacccagatgagcagacctcacgaaccctcaccctcattgccaaggtcatccagaacctggccaacttttccaagtttacctcaaaggaggactttctgggcttcatgaatgagtttctggagctggaatggggttccatgcagcagtttttgtatgagatctccaatctggacacgctaaccaacagcagtagctttgagggttacatcgacttgggccgagagctctccacactgcatgccctactctgggaggtgctgccccagctcagcaaggaagccctcctgaagctgggtccactgccccggctcctcaacgacatcagcacagctctgaggaaccccaacatccaaaggcagccaagccgccagagtgagcggccccggcctcagcctgtggtactgcgggggccatcggctgagatgcagggctacatgatgcgggacctcaacagctccatcgaccttcagtccttcatggctcgaggcctcaacagctctatggacatggctcgcctcccctccccaaccaaggaaaagccacccccaccaccgcctggtggtggtaaagacctgttctatgtaagccgtccacccctggcccgttcctcaccagcatactgcacgagcagctcggacatcacagagccagagcagaagatgctgagtgtcaacaagagtgtgtccatgctggacttacagggtgatgggcctggtggccgcctcaacagcagcagtgtttcgaacctggcggccgtaggggacctgctgcactcaagccaggcctcgctgacagcagccttggggctacggcctgcgcctgccggacgcctctcccaggggagtggctcatccatcacggcggctggcatgcgcctcagccagatgggtgtcaccacagacggtgtccctgcccagcaactgcgaatccccctctccttccagaaccctctcttccacatggctgctgatgggccaggtcccccaggcggccatggagggggcggtggccatggcccaccttcctcccatcaccaccaccaccaccatcaccaccaccgaggtggagagccccctggggacacctttgccccattccatggctatagcaagagtgaggacctctcttccggggtccccaagccccctgctgcctccatccttcatagccacagctacagtgatgagtttggaccctctggcactgacttcacccgtcggcagctttcactccaggacaacctgcagcacatgctgtcccctccccagatcaccattggtccccagaggccagccccctcagggcctggaggtgggagcggtgggggcagcggtgggggtggcgggggccagccgcctccattgcagaggggcaagtctcagcagttgacagtcagcgcagcccagaaaccccggccatccagcgggaatctattgcagtccccagagccaagttatggccccgcccgtccacggcaacagagcctcagcaaggagggcagcattgggggcagcgggggcagcggtggcggagggggtggggggctgaagccctccatcaccaagcagcattctcagacaccatccacattgaaccccacaatgccagcctctgagcggacagtggcctgggtctccaacatgcctcacctgtcggctgacatcgagagtgcccacatcgagcgggaagagtacaagctcaaggagtactcaaaatcgatggatgagagccggctggatagggtgaaggagtacgaggaggagattcactcactgaaagagcggctgcacatgtccaaccggaagctggaagagtatgagcggaggctgctgtcccaggaagaacaaaccagcaaaatcctgatgcagtatcaggcccgactggagcagagtgagaagaggctaaggcagcagcaggcagagaaggattcccagatcaagagcatcattggcaggctgatgctggtggaggaggagctgcgccgggaccaccccgccatggctgagccgctgccagaacccaagaagaggctgctcgacgctcaggagaggcagcttccccccttgggtccaacaaacccgcgtgtgacgctggccccaccgtggaatggcctggcccccccagccccaccacccccaccccggctgcagattacggagaacggcgagttccgaaacaccgcagaccactagcccacccagcatcagagaccttctcttcctttcctgtgcaccccaccctgtaacagcaccaaccaccaggattggacatcaccgaggaacagcgggattgcctccccgaatgcctccctgggaggcacactgattgcccacccccaccactgcaccatttccaggagggagagtggggaccctcagccgcccccttttccttcccattggggtgctgccctctctttgacccccagggacccttgccccaggacaccgcctaccccgtacagaccccttcactccggggtgctatccccatcctctgcctcatcgttcccctgagcactgggggacagaccctcacccccaccctgggggtgtggcacctccaaactttcaacttcagggtgatttttttagcagtaaccagagctgacaatctaactcccctccaccgccccattttggcctcccctgccccccttgttatggggaggggaccccgggtgagggggccctattaccccttgatttctcaggagcgtctgggggggctcagcacgcacaaactccttctccttctaccactcttaaatttactccctccccacccagaacccagatggggtggagggggccaccggggcagggagggggcggcaaggggggaatgggagttgtctccccttctccccacacctgatctgctctcggctggtcccagagcggggtgagggggcttatgcccccccctcccccagtgtgttgggtggggtggaattgaggttagggtgaggggtcagggtttaggagggtgtgtatgttgggaggacaggctagttgatctgtcctactctgacacacagtcccctctgccccttccttctctcttcttggtctctactcccagggggaggggggaacttactctaggaaaagccatgtctctctcccccagggtggggggacctgtgttggaggaggggtgttggggggcccccttccatgactctgtcccctgggggaggtaggacagggctgggcttccctctcatcctccccctcccaatctccttccacctccctccctcccgccagctccacgatttttcggtgtttctctgtacatagttttctggcgggataggggaggtaggatggatggggtttggggtgggtaggccatgggaggggagaagcccctccttggcaccccctcttccctgactgctgtcccctacccagccttgcccccttcatccttttgcgtttggtattgagactctcctagactctactcctctttcttttgtatggacagttccccttcagtcccatccccctacacatacacccagccggggccaaatttatacttatataaaagttgtaaatatgtgaaattttatccctgtgccctttccccacctcaggccctacccctggaccctccccaaccttccttctctcttctttggctgttgtaattatctggggtttgtactgtacatatccggggtgtgtgtgtgtgggctgggggcaacccttctgtacagagcttcctggccccctccccccccgcccctctgcttccctccccacccaccacctcaagggtagggagttgctcttcctacctgttttattttgttttctcgttctccctccccaccccactcccagccttatctatcccccctcactgtccccttttctccactcccagccccatttcctttttttctggagtgtgtggtgaaacagaaaaaaacatgtttaataaacggagattgttctttta

SEQ ID NO: 57330 - DNA, 3145 bp, Homo Sapiens
aaagtctatacgcaataagtaagcccaaagaggcatgtttgcttggcgatgcccagcagataagccaggcaaacctcggtgtgatcgaagaagccaatttgagactcagcctagtccaggcaagctactggcacctgctgctctcaactaacctccacacaatggtgttcgcattttggaaggtctttctgatcctaagctgccttgcaggtcaggttagtgtggtgcaagtgaccatcccagacggtttcgtgaacgtgactgttggatctaatgtcactctcatctgcatctacaccaccactgtggcctcccgagaacagctttccatccagtggtctttcttccataagaaggagatggagccaatttctatttacttttctcaaggtggacaagctgtagccatcgggcaatttaaagatcgaattacagggtccaacgatccaggtaatgcatctatcactatctcgcatatgcagccagcagacagtggaatttacatctgcgatgttaacaaccccccagactttctcggccaaaaccaaggcatcctcaacgtcagtgtgttagtgaaaccttctaagcccctttgtagcgttcaaggaagaccagaaactggccacactatttccctttcctgtctctctgcgcttggaacaccttcccctgtgtactactggcataaacttgagggaagagacatcgtgccagtgaaagaaaacttcaacccaaccaccgggattttggtcattggaaatctgacaaattttgaacaaggttattaccagtgtactgccatcaacagacttggcaatagttcctgcgaaatcgatctcacttcttcacatccagaagttggaatcattgttggggccttgattggtagcctggtaggtgccgccatcatcatctctgttgtgtgcttcgcaaggaataaggcaaaagcaaaggcaaaagaaagaaattctaagaccatcgcggaacttgagccaatgacaaagataaacccaaggggagaaagcgaagcaatgccaagagaagacgctacccaactagaagtaactctaccatcttccattcatgagactggccctgataccatccaagaaccagactatgagccaaagcctactcaggagcctgccccagagcctgccccaggatcagagcctatggcagtgcctgaccttgacatcgagctggagctggagccagaaacgcagtcggaattggagccagagccagagccagagccagagtcagagcctggggttgtagttgagcccttaagtgaagatgaaaagggagtggttaaggcataggctggtggcctaagtacagcattaatcattaaggaacccattactgccatttggaattcaaataacctaaccaacctccacctcctccttccattttgaccaaccttcttctaacaaggtgctcattcctactatgaatccagaataaacacgccaagatagcagctaaatcagcaagggttcctgtattaccaatatagaatactaacaattttactaacacgtaagcataacaaatgacagggcaagtgatttctaacttagttgagttttgcaacagtacctgtgttgttatttcagaaaatattatttctctctttttaactactctttttttttattttggacagagtcttgctccgtcgcgcaggctgtgatcgtagtggtgcgatctcggctcactgcggcctccgctccctgggttcaagcgattctcctgcctgagcctcctgagtagctgggactgcaggcacgtgccaccacgcccggctagttttttgtatttttagtagagatggggtttcacgttgttggccaggatggtctccatctcctgacctcatgatccgcccaccttggcctcccaaaatgctgggattacaggcatgagccactgcgcccggcctctttttagctactcttatgttccacatgcacatatgacaaggtggcattaattagattcaatattatttctaggaatagttcctcattcatttttatattgaccactaagaaaataattcatcagcattatctcatagattggaaaattttctccaaatacaatagaggagaatatgtaaagggtatacattaattggtacgtagcatttaaaatcaggtcttataattaatgcttcattcctcatattagatttcccaagaaatcaccctggtatccaatatctgagcatggcaaatttaaaaaataacacaatttcttgcctgtaaccctagcactttgggaggccgaggcaggtggatcacctgaggtcaggagttcgagaccagcctggccggcatggcgaaaccccttctctgctgaaaatacagaaattagctgggcgtggtggtgcatgcctgtagtcccagctacttgggaggctgaggcgggagaatcgcttgaacccagggggtggaggttgcagtgagccgagattgtgccactgcactccaacctgggtgacagagtgagattccatctgaaaaacaaaaacaaaaacagaaaacaaacaaacaaaaaacaaaaaatccccacaactttgtcaaataatgtacaggcaaacactttcaaatataatttccttcagtgaatacaaaatgttgatatcataggtgatgtacaatttagttttgaatgagttattatgttatcactgtgtctgatgttatctactttgaaaggcagtccagaaaagtgttctaagtgaactcttaagatctattttagataatttcaactaattaaataacctgttttactgcctgtacattccacattaataaagcgataccaatcttatatgaatgctaatattactaaaatgcactgatatcacttcttcttcccctgttgaaaagctttctcatgatcatatttcacccacatctcaccttgaagaaacttacaggtagacttaccttttcacttgtggaattaatcatatttaaatcttactttaaggctcaataaataatactcataatgtctcattttagtgactcctaaggctagtccttttataaacaactttttctgacatagcatttatgtataataaaccagacatttaaagtgtaaaaaaaaaaaaaaaaaa

SEQ ID NO: 57331 - DNA, 14315 bp, Homo Sapiens
gcggccgcagaatcgagctcgggccccggcccccggcccgcggcgcggggctcccgggccccgccgcggacgtcgcgccggtcgccccttccccgtagcccgtgcgccctcggcgcggagccccggcccgccgcggtcccgtctcctgggcctgtcccgcccgcgccctccgccggccctcaggtataatacttctccacgtctgcttcaggaagaaagtgcctgccattcttatcatttctaagcaggttcatgccagcccagaacagagaatcagctggagcccagatttcaagttttgagtaaaataccttcaagcgaatgggccctattgtgctcacacattcagaacctgttacccaaggaattccctaaagaattagaagtgcgtctcaccaaccagccaagatgaacatggtgaagaggatcatggggcggccgaggcaggaggagtgcagcccacaagacaacgccttaggactgatgcacctccgccggctcttcacggagttgtgccatcctccccggcacatgactcagaaggaacaagaagagaaactgtatatgatgctgccagtgtttaacagggtttttggaaatgctccgccgaatacaatgacagaaaaattttctgatcttctgcagttcacaacacaagtctcacgactaatggtgacagaaattcgaaggagagcatcaaacaaatccacagaggctgcaagtcgggccatagttcagttcctagagattaatcagagtgaagaagccagtagaggctggatgcttctaacgacaattaatttgttagcttcctctggtcagaaaaccgtggactgcatgacaacaatgtcagtgccttccaccctggttaaatgtttatatctgttttttgaccttccacatgtgcctgaggcagttggaggtgcacagaatgagctacctctagcagaacgtcgaggactactccagaaagtttttgtacagatcttagtgaaactgtgcagttttgtttcccctgcggaggagctggctcagaaagatgatctccagcttctattcagtgcaataacctcttggtgccctccctataacctgccttggagaaagagtgctggagaagtcctcatgaccatatctcgtcatggtcttagtgtcaatgtagtgaagtatattcatgagaaagagtgtttatctacatgtgttcagaatatgcagcaatcagatgacctgtctcccctagaaattgtcgaaatgtttgctgggctttcttgtttcctcaaagattccagcgatgtttcccaaacacttctggatgattttcggatatggcaaggatataattttctttgtgatctcttgcttagattggaacaagcaaaagaggcagaatccaaagatgccttgaaagatctggttaatctgataacttccctaacaacatatggtgtcagtgaactaaaaccagctggtattaccacaggggcaccctttttattgcctggatttgcagtacctcagcctgcaggcaaaggtcacagtgtgagaaacgtccaggcctttgcagttcttcagaatgcatttttaaaagcaaaaaccagcttccttgcccaaatcatccttgatgctatcacaaatatttacatggctgacaatgccaattacttcatcctagagtcacagcacacattgtcacagtttgcagagaagatttctaaactcccagaagtacaaaacaaatactttgagatgctggagtttgttgtttttagcttaaattatataccttgtaaagaacttattagtgtcagtatcctcttaaaatctagctcttcttatcactgtagcattattgcaatgaaaacacttcttaagtttacaagacatgactacatatttaaagacgtgttcagggaggttggccttttggaggtcatggtaaaccttttgcataaatatgctgccctgttgaaggatccaactcaggcactaaatgaacaaggggactcaagaaataatagttcagttgaagaccaaaaacacctggctttattggttatggagaccttgacagtgcttcttcaaggatcaaacacaaatgcaggaatttttcgagaatttggaggtgcaagatgtgcacataatatagtaaagtaccctcaatgccggcagcatgccttgatgactatccaacagctggtgctctccccaaatggggacgatgacatgggcactctcctggggctaatgcattcagccccaccgacggaattgcagttgaagactgatattttaagggccctcctgtcggtccttcgagaaagccatcgttcaagaacagtttttaggaaagttggaggatttgtgtacattacatccttgctcgttgctatggaaagatctttgagctgtccacccaagaatggctgggagaaagtgaaccagaatcaagtgtttgaacttcttcacactgtgttctgcacgttgactgcagcaatgcgctatgagccagccaactctcatttcttcaaaacagagattcagtatgagaagttggcagatgctgttcgatttcttggctgcttctcagacctaagaaaaataagcgccatgaatgtcttcccctcaaatacacagccatttcaaagacttttagaggaagatgtaatctcaatagaatcagtgtcacccacgttacggcactgcagtaaactttttatttatctttacaaagtagccacagattcttttgacagtcgtgcagaacagatccctccttgcctgacaagtgagtcttctctcccctctccttggggtacaccagctttgtccaggaaaaggcatgcatatcattctgtttcaactccccctgtttaccctcctaaaaatgttgccgacctgaaactacatgtgacaacttcatctctgcagagttctgatgcagtcatcattcatcctggagccatgcttgccatgctggacctactggcctctgttgggtcagtgacacagccagaacatgctttggatcttcaacttgccgtggcaaatattttacaatccctggtgcacacagaaaggaaccagcaagtcatgtgtgaagctggtcttcatgcacgactgctgcagaggtgcagtgctgcattggctgatgaggaccactcactgcacccgcccctgcagcggatgtttgaacgattagcctctcaggctctggaacccatggtgttgagggagtttttacgtttggcaagtcctttaaattgtggtgcctgggacaaaaaactgctaaaacaatatagggtccacaaaccaagttcactgagttatgaaccagaaatgagaagtagtatgatcacatctctggaaggtctgggtactgataatgtttttagcttacatgaagataaccattaccggataagcaagagcctggtaaaatctgcggaaggaagtactgtacccctgaccagggtgaagtgtctggtctccatgacaaccccacatgacatcagacttcatgggtcatcagttactccagcttttgttgaatttgacacatcacttgaagggtttggatgtctttttttgcccagtttggcccctcataatgctcctacaaataataccgtcacaacaggtcttattgatggggctgtggtcagtggcattggttctggtgaaagattcttccctcctccctccggcttaagttactctagctggttttgtattgaacattttagttctcctccaaataaccaccctgtcagacttcttactgttgtgcgccgagcaaattcttctgagcaacattacgtgtgccttgcaatagttctatcagcaaaagaccgatctctgattgtttccaccaaagaggaactcctccaaaattatgttgatgattttagtgaagagtcctcattttatgaaattctcccatgctgtgctcgctttcgatgtggagagcttatcattgagggacagtggcatcatttggtcctggtaatgagcaaaggcatgttgaaaaacagtactgcagccctttatattgatggacagcttgttaacactgtaaagcttcattatgtccacagtactccagggggttcaggttcggcaaatccaccagtggtgagcacggtctatgcctacattggtactccacctgcccaacgccaaattgcctcattggtttggcgcctgggacccacacattttctagaagaagttttaccttcttcaaatgttactaccatttatgaacttggaccaaattatgttggaagctttcaggctgtatgtatgccatgtaaagatgcaaaatccgaaggggtggtgccatcccctgtgtcattagtaccagaggagaaagtgtcatttggcctctatgcactctctgtgtcgtctctaacagtggcaagaatccggaaagtgtataacaaattggatagcaaagccattgctaagcagttaggcatttcctcacatgagaatgccactcctgtgaagttgatacacaattcagcaggacatcttaatggatctgcacggacaattggggccgctctgattggatacttgggagtaagaacatttgtccctaagcctgttgccactactttgcagtacgttggtggagctgcagccatcctgggcctggtggccatggcctctgatgtggaagggttatatgcagcagtcaaggccctggtttgtgtggtcaagagtaacccactagccagcaaagaaatggaaagaatcaagggctaccagttgctggcaatgttgcttaagaagaaacgttcccttcttaacagccacatcctccatctaactttttctttggtgggaactgttgatagtggacatgagacctccattattccaaattcaactgctttccaggacctcctctgtgattttgaagtctggctccatgcaccatatgaacttcatctttccttatttgaacactttattgaactgctcacagagtccagtgaagcctcaaagaatgccaaattaatgagagaattccagttaatcccaaagctgctcctgactcttcgagatatgtctttatcccagcctactattgctgctattagtaatgtcctgagcttcttactgcaaggttttcctagcagcaatgatctgctcagatttgggcagtttatttcttctactttgccaacctttgcggtttgtgagaaatttgtagtaatggaaataaataatgaagagaagcttgacactggaactgaagaggagtttggaggtcttgtatcagctaatcttatacttttgaggaacagacttctggatatcttgctaaaactaatttatacatctaaagaaaagacaagcattaatttgcaagcttgtgaagaactggtgaagacactgggttttgactggatcatgatgtttatggaggaacacttacattccaccacagttacagcagccatgaggattcttgttgtcctactaagtaatcagtctattctcatcaagtttaaagaaggactcagtggtggaggatggcttgaacagacagattctgtcttaactaataagattggaactgtattaggattcaacgtgggcagaagtgctggtgggagatcgacggtcagggagattaaccgagatgcttgtcattttcctggttttccagtccttcagtcattccttcctaaacacactaatgtccctgccctctattttctcctcatggccttgtttctgcagcagccagttagtgagctgcctgagaacctgcaggtcagtgtgcctgtcatcagctgccggagtaagcagggttgccagtttgatttggattccatttggacattcatctttggagttcctgcctccagcggaactgtggtctcttctatccataacgtatgcacagaagctgtttttttattattgggaatgctccgcagcatgctgacttcaccttggcaatcagaagaagagggatcttggctccgagaatatcctgtgaccctgatgcagttcttcagatatttgtatcacaacgtgccagaccttgcctccatgtggatgagccctgacttcctgtgtgcattagcagccaccgtcttccccttcaatattcgcccttactcagagatggtgactgaccttgatgatgaagttggatctccagcagaagagtttaaagcgtttgcagcagacacagggatgaacaggagccaatcagagtactgcaatgtgggcaccaagacatatctgaccaatcacccggctaaaaagttcgtttttgacttcatgcgggtcttaatcatagacaacctctgtctcactcctgccagcaagcaaactccactaattgatcttttgttggaggcttcccctgaaaggtctacaagaactcagcaaaaagaatttcaaacttacattttggatagcgtgatggaccatttgcttgcagctgatgtgttattaggggaagatgcatctctgcctattaccagtggaggaagctaccaggtattggtgaacaatgtgttttatttcacacagcgtgtggtggacaagctttggcaaggcatgttcaacaaagaatctaaacttcttatagattttataattcaactaattgcacagtcaaagagaagatcacagggattgtcactggatgcagtgtatcattgcctcaataggaccatcttgtaccagttctcacgggcacacaaaaccgttcctcagcaagtagctctgcttgattcactcagggtcctcactgtaaacagaaacttgatcctgggacctgggaaccatgaccaagaattcattagctgtctggcccactgcttgataaatctacatgttggaagcaacgtggatggatttggactggaagcagaagcccgcatgaccacatggcacattatgatcccctcggacattgaaccagatggtagttacagccaagatattagtgaagggcgtcagcttctcataaaagctgtcaacagagtttggactgaactgatacatagtaagaaacaagtcttagaggaacttttcaaagtaactctacctgtgaatgaaaggggccacgtggacatagctacagcaaggccactcattgaagaagctgccctgaagtgctggcagaatcatttggcccatgaaaagaaatgcataagtcgaggagaagctttagcgcccaccacacagtccaaattatcccgtgtcagcagtggctttggtctttccaagttaacaggatcaagaaggaatcgaaaagaaagtggtcttaataaacacagtctttccacccaggagatttcgcagtggatgtttactcacattgctgttgttcgtgacttagtagatacacaatataaagaatatcaggagcgtcagcagaatgccctgaagtacgtgacagaagagtggtgtcagatcgagtgcgagctgttgagggagcgggggctgtggggccctcccatcggctcccacctcgacaagtggatgctggagatgacagaagggccctgcaggatgaggaaaaagatggtgcgaaatgatatgttttataaccattacccttacgtgccagaaactgagcaagagacaaatgtggcgtctgagatcccaagtaaacagcctgagacacccgatgatattcctcaaaagaaacctgctcgatatagaagagccgtaagttatgacagtaaagagtactacatgcgactggcctctggcaatcccgccattgtccaagacgccattgtggagagttcagaaggtgaagctgctcagcaagaaccagagcatggggaagacactattgctaaagtcaaaggtttggtcaagcctcctctaaaacgctcccgatctgcacctgatggaggagatgaggagaaccaggagcagctacaagaccagattgctgagggcagctccatagaagaggaggagaaaacagataatgctaccttactgcgcctgttagaggaaggagaaaagatccaacacatgtaccgctgtgctcgagtccagggcctagataccagtgaggggctccttctttttggtaaagagcatttttatgtgattgatggatttaccatgacagcaaccagggaaataagagatattgaaaccttacctccaaatatgcatgagcctattattcctagaggagccaggcaaggccctagtcaactcaagagaacatgcagcatttttgcatatgaagatatcaaggaagttcataaaaggagatatctcctgcagcctattgctgtggaagttttctctggagatggacggaattacctccttgcttttcagaaaggaatcagaaacaaagtctatcaaaggtttttggctgtagtgccatctctaacggacagttcagaatctgtatctgggcaacgaccaaacacgagtgtggagcagggatctgggttacttagcactttggttggagagaagtctgtgactcagagatgggagagaggtgaaatcagcaacttccaatatttgatgcatttgaacactttggctggcagatcatataatgatctcatgcagtatcctgtcttcccctggatccttgcagattatgactcagaggaggtggatcttactaatcccaagacgtttagaaacctggctaagccaatgggagcacaaacagatgaacgattagctcagtataagaagcggtataaagactgggaggatcctaatggagaaactcctgcataccactatgggacccactattcatctgcaatgattgtggcctcataccttgtaaggatggagcctttcacacagatattcttaaggctacagggtggccactttgacctggctgaccggatgtttcacagtgtgcgcgaggcctggtattcagcgtcaaagcacaatatggcagatgtaaaagaacttatcccagagttcttttatttaccagaattcctgttcaattccaacaactttgatctaggctgtaaacaaaatggcaccaagcttggagatgttatccttccaccctgggcaaaaggggacccacgagaattcatcagagtccatcgtgaggctttggagtgtgattacgtgagtgcccatctacatgagtggattgacttaatcttcggttataaacagcaaggccctgctgcagtagaagctgtaaatgtcttccatcatcttttttatgagggtcaagtggatatctacaacatcaatgacccactaaaggagacagccacaattgggttcattaataacttcggtcagatccctaaacagttatttaaaaaacctcatccaccaaagcgagtgagaagtcgactcaatggagacaatgcaggaatctctgtcctaccaggatctacaagtgacaagatcttttttcatcatctagacaacttgaggccttctctaacacctgtaaaagaactcaaagaacctgtaggacaaatcgtatgtacagataaaggtattcttgcggtggaacagaataaggttcttatcccaccaacctggaataaaacttttgcttggggctatgcagacctcagttgcagactgggaacctatgagtcagacaaggccatgactgtttatgaatgcttgtctgagtggggccagattctctgtgcaatctgccccaaccccaagctggtcatcacgggtggaacaagcacggttgtgtgtgtgtgggagatgggcacctccaaagaaaaggccaagaccgtcaccctcaaacaggccttactgggccacactgataccgtcacctgcgccacagcatcattagcctatcacataattgtcagtgggtcccgtgatcgaacctgtatcatttgggatttgaacaaactgtcatttctaacccagcttcgagggcatcgagctccagtttctgctctttgtatcaatgaattaacaggggacattgtgtcctgcgctggcacatatatccatgtgtggagcatcaatgggaaccctatcgtgagtgtcaacacgttcacaggtaggagccagcagatcatctgctgctgcatgtcggagatgaacgaatgggacacgcagaacgtcatagtgacaggacactcagatggagtggttcggttttggagaatggaatttttgcaagttcctgaaacaccagctcctgagcctgctgaagtcctagaaatgcaggaagactgtccagaagcacaaatagggcaggaagcccaagacgaggacagcagtgattcagaagcagatgagcagagcatcagccaggaccctaaggacactccaagccaacccagcagcaccagccacaggccccgggcagcctcctgccgcgcaacagccgcctggtgtactgacagtggctctgacgactccagacgctggtccgaccagctcagtctagatgagaaagacggcttcatatttgtgaactattcagagggccagaccagagcccatctgcagggcccccttagccacccccaccccaatcccattgaggtgcggaattacagcagattgaaacctgggtaccgatgggaacggcagctggtgttcaggagtaagctgactatgcacacagcctttgatcgaaaggacaatgcacacccagctgaggtcactgccttgggcatctccaaggatcacagtaggatcctcgttggtgacagtcgaggccgagttttcagctggtctgtgagtgaccagccaggccgttctgctgctgatcactgggtgaaggatgaaggtggtgacagctgctcaggctgctcggtgaggttttcactcacagaaagacgacaccattgcaggaactgtggtcagctcttctgccagaagtgcagtcgctttcaatctgaaatcaaacgcttgaaaatctcatccccggtgcgtgtttgtcagaactgttattataacttacagcatgagagaggttcagaagatgggcctcgaaattgttgaagattcaacaagctgagtggagaccatggtctgtagaccccttcccgattctcctgtcccagcttggaaggcattgaaaacagtctccgtttacacatctcttcataccacgtgtttgaagtgttaaaattcaaagggatcattgaataaaacgggtgtagagtacaggaatggggcagacgcgattcaggtgaacagcacaagaagaatatgaggtggttcctaggagcaacactttcgacctccagttctccctgatgacagtagctgtctccaagagaaaaatcctcacttattaactctcttttcttgcatctcatttttatagagctactcatccttatttggaaaaaccaacaacaaaaaaggcttttagaaaatggttgtaaatctgacttctttgcaagtaactatgtatattgtaaatagatataaaaggccttttttctaaataaggacttaactgcctgtaacatgaaacttcaaactaaaccactaactcaatgaactacttatggtttgtctgacatccctcacttaccaattaattataaatatgtttttttaaatccccaaagacattatctgtggtctttttttcctttcaagctcagcctgtgtgcctgatgtcatttctttcaagttgcccacagtatctccacttaaactaggctagtaaccaaaataatgtggaccttctttaggaaacagtgtgggagaataggagtccagccgtaagataaactggaaatatttgggcgtcttgtacctggctacgcaccacctcagtgttgttcctacataaacagggccccttttaaacttgtatgtggactgctgtttggtcaaagaataccttcttagcattgcagaaaggtggtcagatgaccagtgtagtgcaggaaacagccctgtctcaactaatggaaatatatttgcatgtaacccaaaattagcttatcttgcatagaacataataagtatgtgtctttggtgacactaatgttctactatagcttattttcaaacaaggggtaaaaaaaggaaagaaagaagtgtacagaattaacatataaactttgttgtaaaactgaatcatgtcagaactgcttaaaattaacctttaccatttaatgtcatctacctgaaaacagtgagatttatactgtatcaatgtctatttttttgtttttgctatgaatataattacagtattttaatatttagttatttaatttgttctactagttggatacagaacacacaaatccagggggattaaagctggaaggggctaagagattagtttacagagaaaaggcttggtggtgggatttttttaaatgtgtgttatgtacatatatatatatatataatatatattaaaaatgaaacaattaatctagattttaacattttcagaaacttagtgataacattatgaacaattctaaaagccctgtgatttgaaaaatatagaatcattaatggcccaagataggccttcacaccttcacaggtgcgaaaggaaaggccttcacaccctcacagaggcatcatgcaaaggacagcggctttggcttttccaattttccatctttaggccctggtgagaggcacacttatgcactaaaatgcacatatatgcacatgcattcaaaaataggcatttggtacaatggtgatcttgtacctgatgggctgaaaccagcttaagaacaaatttgttcttcctgatatgataactaggtctccaagagaaaatagaaaggctgctttagtgccttacgcttactaaatttaaatctttatttacctgggtttgagcctacagtctatttatgattacatatcaaaattgattaaaacacttccatttctaaaagttcaaatatacttgttaataaaaggattatcggcattaatactttaatttaaagaaaagttgtgttctgttttcctttctgtgtcttactccccccacactctccctcccccatcaccatcttcaattctaataaataatgctgatgttcaacagttgcagaaattgtgctattatgtaactgtgggccttgcccctgtctggccctctagatgatttgtagcagtgttattctacactttttaaaagaagcgtcctccttttgtccatgaatcatgtttaccccatacccagtggcagaggtgttctttaaagacttgaatatatgaatgtgtgtgtgtagttacttaaaggttattcctctttgtaataggaaactatatgggatgaacacttttaaactttccgacacaacttccattactaactttctaacagaacttccataactagaaggtggaaaccaaaaccctcatggtagtatttcctctggcagctggtgctgtgggcaactgttttgttcaatcgggtttcttttctttttgcctctaatgcagaaatcaacagaatcactcacacatacaagtacactcacatacataaactaattatttctctggatatctttctgtgttccatgtaaatttatttaccaacatctattgtcaacatgtacatctaccttagtatggtctgcattctttttctgagagtacctcatagggctcctgcctgatctttgtagtttgttcattcatccatccacctgttcatttgttcatccatgtattctaacatttctatgtagtgtgcaactctaatgtcatgcttttgaagaagagaatagctgcccatagcagccatccgtctggataatagcaaaacactctagataagttattttgcactttcttatgtataaagttggtagaaacttatttttgctttgtatcatttaaatacattttgttttggtaaatgaactgtgtataaaatatttatgccgttaaaactgtttttagaaagtatttttaatttcagcaagtttggttacttgttgcatgactcttaacacagctgactttttgtgtcagtgcaatgtatattttttgtcctgttattaacttgtaagccctagtaatggccaattatttgtacagcaacagaagtaaattgaagatactggctaagactggattgattgtggacttttatactatattgcagaaaccaatatctgtttcttggtggttatgtaaaagacctgaagaattactatctagtgtgcagtctgtgatatctgaatgttcattgtatatttgtctctgatgcaaaaaggtagagtaacacaattacaatacatgattaaatgcaatagtccaggtacttaagtaatttttttttcatttcaaataaatacctatttaccaccaaaagaaag

SEQ ID NO: 57332 - DNA, 1516 bp, Homo Sapiens
ggctcccatggccctcgggcccagcgtggtgaccccgggggatggagccgttcctcaggaggcggctggccttcctgtccttcttctgggacaagatctggccggcgggcggcgagccggaccatggcacccccgggtccctggaccccaacactgacccagtgcccacgctccccgccgagccttgcagccccttccctcagctcttccttgcgctctatgacttcacggcgcggtgtggcggggagctgagtgtccgccgcggggacaggctctgtgccctcgaagaggggggcggctacatcttcgcacgcaggctttcgggccagcccagcgccgggctcgtgcccatcacccacgtggccaaggcttctcctgagacgctctcagaccaaccctggtactttagcggggtcagtcggacccaggcacagcagctgctcctctccccacccaacgaaccaggggccttcctcatccggcccagcgagagcagcctcgggggctactcactgtcagtccgggcccaggccaaggtctgccactaccgggtctccatggcagctgatggcagcctctacctgcagaagggacggctctttcccggcctggaggagctgctcacctactacaaggccaactggaagctgatccagaaccccctgctgcagccctgcatgccccagaaggccccgaggcaggacgtgtgggagcggccacactccgaattcgcccttgggaggaagctgggtgaaggctactttggggaggtgtgggaaggcctgtggctgggctccctgcccgtggcgatcaaggtcatcaagtcagccaacatgaagctcactgacctcgccaaggagatccagacactgaagggcctgcggcacgagcggctcatccggctgcacgcagtgtgctcgggcggggagcctgtgtacatcgtcacggaactcatgcgcaaggggaacctgcaggccttcctgggcacccccgagggccgggccctgcgtctgccgccactcctgggctttgcctgccaggtggctgagggcatgagctacctggaggagcagcgcgttgtgcaccgggacttggccgcccggaacgtgctcgtggacgacggcctggcctgcaaggtggctgacttcggcctggcccggctgctcaaggacgacatctactccccgagcagcagctccaagatcccggtcaagtggacagcgcctgaggcggccaattatcgtgtcttctcccagaagtcagacgtctggtccttcggcgtcctgctgcacgaggttttcacctatggccagtgtccctatgaagggatgaccaaccacgagacgctgcagcagatcatgcgagggtaccggctgccgcgcccggctgcctgcccggcggaggtctacgtgctcatgctggagtgctggaggagcagccccgaggaacggccctccttcgccacgctgcgggagaagctgcacgccatccacagatgccacccctgagtcctcac

SEQ ID NO: 57333 - DNA, 2462 bp, Homo Sapiens
gcggctgtctcacggaccacggcggcgcccgcagctcctcaccgcagcacccccactgcaggcccgaggagctttccggagcttcccacactcctggggagaagacttcttagccagcttgatgtttaaaattcagctggagcccttaaaacttcgagcgtggacgctgaatgggtttgtaaagtttcgaaacaaggagaccagtgctggtccagtggctgtgatgggaaaagattattacaagattcttgggatcccatcgggggccaacgaggatgagatcaagaaagcctaccggaagatggccttgaagtaccacccagacaagaataaagaacccaacgctgaggagaagtttaaggagattgcagaggcctatgatgtgctaagtgaccccaagaaacggggcctgtatgaccagtatggggaggaaggcctgaagaccggcggtggcacatcaggtggctccagtggctcctttcactacacctttcatggggacccccatgccacctttgcctccttctttggtggctccaaccccttcgatatcttctttgccagcagccgctccactcggcccttcagtggctttgacccagatgacatggatgtggatgaagatgaggacccatttggcgctttcggccgttttggcttcaatgggctgagtaggggtccaaggcgagccccagaaccactgtaccctcggcgcaaggtgcaggaccccccagtggtgcacgagctgcgggtgtccctggaggagatctaccatggctccaccaagcgcatgaagatcacaaggcgtcgcctcaaccctgatgggcgaactgtgcgcaccgaggacaagatcctgcacatagtcatcaagcgtggctggaaggaaggcaccaagatcaccttccccaaagaaggcgacgccacacctgacaacatccctgctgacatcgtctttgtgctcaaagacaagccccatgcacacttccgccgagatggcaccaacgtgctctacagtgccctgatcagcctcaaggaggcgctgtgtggctgcactgtgaacattcccactatcgacggccgagtgatccctttgccctgcaatgatgtcatcaagccaggcaccgtgaagagactccgtggggagggccttcccttccccaaagtgccaactcagcgaggagacctcattgttgagttcaaagttcgcttcccagacagattaacaccacagacaagacagatccttaagcagcacctaccctgttcctaggctctgccccagccagtccagagcctaccacagcaatacccccaacactcactccactcaatgtgcacccagcttgatgtccactggacactggcaactttttctaaaatgcaaaaaaaagccactggttttcaggaaaatgttcctgtccctgaccccttttagagctgggctgcctggggggagtgggagggaggtggggagagctagcccaggccaggggtcaatgttcatgtcactagctttcaatccagtttccactgcagtggctggagagtgacctgagtgctacttgaagatatgtagagattccttatccatgcctgtacatagcatgtcctcctcccctcagctttgctaataccagtcccctcccttccctttggcttcctgctgttgggggtggaaaagactagaaaggacattgctttctcagccccacccccaggtccacagtgtccaaggtaatggcacacatattcatgcacaagaagcactcacctagagctgtctgtgcctctctgggagaaaggagagaggataagaagggaaagttcacaacctgtgaacagggacttgagcacgagacacttttcatctggagcaggggggtgagctcctcagcagcctccgtaacagctgccctgcctacacctgcagagctggaggttctgtcctccctgctgctctcaggagtgttcaagggtggagggcagggaatggggcctgaggtattaaggctaagaggtgggggacagggcccatctaccagccttcatcaggaagggaaagggctttggggtcaggtggcagctattccccaccaagagattcagggtcacaggtttttccccacacctctgaactcagggcctagccacccccaaacttccaaatcccacttttgtgatatgtgaagctactcatttcttacccttggaggctgtgtggggaatttccagcccttttatgcctgtgtgatcccaccccacccccatagttgtataaaggtcatagtgaagaagctgggggaagactgcttcagccagatcctggggtggggtctttaggttttctcactttgacaacccccgaatgtttttatagtagtttttttgtatttttttgtaatgacagtattatgtaaaaaataaagtattttaaaaatatggaaaaaaaaaaaaaaaaaaaa

SEQ ID NO: 57334 - DNA, 6950 bp, Homo Sapiens; identical to SEQ ID NO: 29137

SEQ ID NO: 57335 - DNA, 12006 bp, Homo Sapiens; identical to SEQ ID NO: 32230

SEQ ID NO: 57336 - DNA, 3164 bp, Homo Sapiens
aaagtggctgaatgagaaatgtagattgcagagggcaactggtgtgtttatatgcctgacattatttgggttttcccccctcaggcagaagctgaggaagattgtcattctgatactgtcagagcagatgatgatgaagaaaatgaaagtcctgctgaaacagatctgcaggcacaactccagatgttccgagctcagtggatgtttgaacttgctccaggtgtaagctctagcaatttagaaaatcgaccttgcagagcagcaagaggctctctccagaaaacatcggcagataccaaaggaaaacaagaacaggcaaaagaagaaaaggctcgagaactcttcctaaaagcagtagaagaagaacaaaatggagctctctatgaagccatcaagttttatcgtagggctatgcaacttgtacctgatatagagttcaagattacttatacccggtctccagatggtgatggcgttggaaacagctacattgaagataatgatgatgacagcaaaatggcagatctcttgtcctacttccagcagcaactcacatttcaggagtctgtgcttaaactgtgtcagcctgagcttgagagcagtcagattcacatatcagtgctgccaatggaggtcctgatgtacatcttccgatgggtggtgtctagtgacttggacctcagatcattggagcagttgtcgctggtgtgcagaggattctacatctgtgccagagaccctgaaatatggcgtctggcctgcttgaaagtttggggcagaagctgtattaaacttgttccgtacacgtcctggagagagatgtttttagaacggcctcgtgttcggtttgatggcgtgtatatcagtaaaaccacatatattcgtcaaggggaacagtctcttgatggtttctatagagcctggcaccaagtggaatattacaggtacataagattctttcctgatggccatgtgatgatgttgacaacccctgaagagcctcagtccattgttccacgtttaagaactaggaataccaggactgatgcaattctactgggtcactatcgcttgtcacaagacacagacaatcagaccaaagtatttgctgtaataactaagaaaaaagaagaaaaaccacttgactataaatacagatattttcgtcgtgtccctgtacaagaagcagatcagagttttcatgtggggctacagctatgttccagtggtcaccagaggttcaacaaactcatctggatacatcattcttgtcacattacttacaaatcaactggtgagactgcagtcagtgcttttgagattgacaagatgtacacccccttgttcttcgccagagtaaggagctacacagctttctcagaaaggcctctgtagagcctcaagtccagtcctctatcacttttgcatgaattaaagtatatagcgcaaaagagcacctaagttataaatgtgtgtgtgtgtgtgtgtgtgtatatatatatatatatatatatatatatatatatatatatatatatatggaattggaacttattttaaattgttggagttcttttaagaagaatataaattgattattttttttatttaaagggatagttgattcctggggtgttttgaaattaagttggaattaagttgcttaagcatatttatgttgtgagaaaccttaatatgaggtttatcatgccctttttcaagcagatttatgagcagatttctgtcacataagtcgtcttctgcttgagtatcctaatatttcaatgcatcaggggagcgctccactggataagcattttatttcccgcatggcataatgtttttgcactaaaggctcaaagtgtgagaacctgttctggatttgtttgaaattatttcaccaataaagatcataaataaatgtttctttcaagaaaatatatttggatggcctttttaaagtaacaggatatttaataagagtcctagatagccagcggagactttaagaatcattgcctctagctgggtgtggtggcatgcacctgtagtcccagctatttgggaggctgatgcaggagaatagcttaagcccaggaatttgagtctgggagtttgagtccagcatgggcaacataacaagaccccatcccttattaaaagaaaaaaaaataattcctcatttcatcattggtctttatatgtagccacaaacactgacctcatgtaggcaccttaccaatatatgacattaagtgagagtgaatcccttaggactggaacacttcaagctcaaccaactgactcagttgtcattcttcacaaaagaatagtagaggatcatgtaaacctgagcctaactcttgttccagtatgaaagttgggggagagcaccagccacctaggaaaactgtatgttacctttttactcaaaggagtcccccctgcccagtaacagtcctattagtgtttaatttcagagtttgtgtctggtagacctctacctgattcagatttggttttgttgtttcaaccatagttagagacaaattctcatgtactttcagaaatcaatatctgcagccactgttacttttaattgacattaagagacacttcataggttcccacaattcagtatgggataggctttttaaaaagcacatacagaccaggcgtggtggctcatgcctataatcccagcactttgggaggctaagacaggcagatcacctgagctcaggagtccaagaccagcctgggcaacatggcaaaacaccgtctctacaaaaaaaaaaaaaaaaaaaattagccaagtacagtggggcacacctatagtcgcagctacttgggaggctggggcaggagaattgcctgagcctgggaagtggaagttgcagtgagccaagatcgtgccattccactccagcctgagcaacacagtgagaccctatctcaaaaaaataatgatgatagtacacgttatgttaaaggtgaaatgtgcatacagaaggaagagagttggccaggtgtggtgactcacacctataatcccaatactttgggaggccaaggcaggaggattgcttgaggtcaggagttttagaccagcctggacaacatagcaagacctcatctcttctaaaaattaaaaaaaaaaaaaa

SEQ ID NO: 57337 - DNA, 2040 bp, Homo Sapiens
gggagtaggcagcggcgccgcgtccgctctcgcccgctctcgcccgctcgccagccggctctcctcccgccgcaggacccgcgcgccgcgctcgggggccatgcagcgcctggccatggacctgcggatgttgtcccgggagctctccctctacctggaacaccaagtccgggtggggttcttcggctcgggggtgggcttatcccttatcctgggcttcagcgtcgcttatgccttctactacctgagcagcattgccaagaaaccccagttagtgaccgggggtgagagtttcagccgcttccttcaagaccactgtcccgtggttacagaaacgtactacccgacggtctggtgctgggagggtcgaggacagaccctgcttagacctttcatcacttcgaagcccccggtgcagtacaggaatgaacttattaaaactgcagatggaggacagatttcactggactggtttgataatgataacagtacgtgttatatggatgccagcaccagacctactatcttattgttgcctggcctcacgggaacaagcaaggagtcatatatccttcatatgatccatcttagtgaagaattaggatacagatgtgtggtttttaacaacagaggagtggcgggggagaatctcttgacgccaaggacttattgttgtgctaacactgaagacttggagacagttattcaccatgtacacagcctgtacccttctgctcctttcctggcagcaggggtttcaatgggaggaatgctgcttctaaattacttgggcaaaattgggtccaaaacgcctttgatggcagctgcaactttttccgttggttggaacaccttcgcttgctcagagtcattggaaaaaccactgaactggctactttttaattactatttgacaacctgccttcagtcttcagttaataagcaccgacatatgtttgtaaaacaagttgatatggatcatgtcatgaaggctaaatccatcagagagtttgataagcgattcacttcagtcatgtttggataccaaacaattgatgattattatactgatgccagtccgagtcctagactgaagtcagtaggaattccagtattgtgtctaaattctgtggatgatgttttctcacccagtcatgctattccaatagaaactgctaagcaaaatcctaatgttgctttggtccttacttcttatggaggccatattggttttctggagggaatctggccaagacagtccacttacatggatcgtgtcttcaagcaatttgtgcaagccatggttgagcatggacatgaactctcttaacatgtagttctttgggtgcattttgtctgaaccacaattgtgaaggcagctcagcttagtgcacaaattttaactgttgtatataaagcaaataagccagcagatgggtgaagaggtccagaatgatatgcaaaaactactttttagagaaacaaaacaactttgtagcaacaaattaaatatagtattagattgttacttacgtagattttatttttactatgccttaccaagtacatccttaaacaaagtagtatgtacatgaaattgcacttaaccaaaactattgtgtaaaacaaattttaattcctcagggttttaatttaaactagtatttttttagattatttgttttaggtgatttaatggtactttaataactactaagaaatattggctatttcaatgtaagttataaggtggtacattcctaagggtatttatagttgatgataacatgaaaactgaaataagataaaatacaacgtgctaaatcttttatgtattctaactttaaaagacaagtgcaacaaagttagactgacttctatatgtgctcttttactctgataatattaaattaggactaacttatgttttataatgattataatttacatgcttatttttaaaatagtatatgtggacacatatatatcattatattaaaataaattctaccattttaaattggaaaaaaaaaaaaaaaa

SEQ ID NO: 57338 - DNA, 3460 bp, Homo Sapiens
attgcccggagatggccggcagagccgccgagacgccgaagagcccgccgcccgcgcgaggtgtagacggggcactgccttcagagcaggtcctgccagcctcgctggagaggatgccctcgtgtccgtgatgggctgtgggacaagcaaggtccttcccgagccacccaaggatgtccagctggatctggtcaagaaggtggagcccttcagtggcactaagagtgacgtgtacaagcacttcatcacagaggtggacagtgttggccctgtcaaagccgggttcccagcagcaagtcagtatgcacacccctgccccggtcccccgactgctggccacacggagcctccctcagaaccaccacgcagggccagggtagctaagtacagggccaagtttgacccacgtgttacagctaagtatgacatcaaggccctaattggccgaggcagcttcagccgagtggtacgtgtagagcaccgggcaacccggcagccgtatgccatcaagatgattgagaccaagtaccgggaggggcgggaggtgtgtgagtcggagctgcgtgtgctgcgtcgggtgcgtcatgccaacatcatccagctggtggaggtgttcgagacacaggagcgggtgtacatggtgatggagctggccactggtggagagctctttgaccgcatcattgccaagggctccttcaccgagcgtgacgccacgcgggtgctgcagatggtgctggatggcgtccggtatctgcatgcactgggcatcacacaccgagacctcaaacctgagaatctgctctactaccatccgggcactgactccaagatcatcatcaccgacttcggcctggccagtgctcgcaagaagggtgatgactgcttgatgaagaccacctgtggcacgcctgagtacattgccccagaagtcctggtccgcaagccatacaccaactcagtggacatgtgggcgctgggcgtcattgcctacatcctactcagtggcaccatgccgtttgaggatgacaaccgtacccggctgtaccggcagatcctcaggggcaagtacagttactctggggagccctggcctagtgtgtccaacctggccaaggacttcattgaccgcctgctgacagtggaccctggagcccgtatgactgcactgcaggccctgaggcacccgtgggtggtgagcatggctgcctcttcatccatgaagaacctgcaccgctccatatcccagaacctccttaaacgtgcctcctcgcgctgccagagcaccaaatctgcccagtccacgcgttccagccgctccacacgctccaataagtcacgccgtgtgcgggaacgggagctgcgggagctcaacctgcgctaccagcagcaatacaatggctgagccgcctggctgtgcacacatgcagcacgacccagcctggccacacactgtggtgccatctgggtccgatgccctctctggagataggcctatgtggcccacagtaggtgaagaatgtctggctccagccctttctctgtgccttcagcagcccctgtcctcaccatggcctgggccaggtgtgacagagtagaggtagcacagggggctgtgactccccctgaactgggagcctggctggcactgatacccctcttggtgggcagctgctctggtggagttgggaagggataggacctggccttcactgtctcccttgccctttgacttttccccaatcaaagggaactgcagtgctgggtggagtgtcctgtggcctcaggaccctttgggacagttacttctgggaccccctttcctccacagagcccttctccctggtttcacacattcccatgcatcctgatccttaagattatgctccagtgggagaccctggtaggcacaaagcttgtgccttgactggacccgtagcccctggctaggtcgaaacagccctccacctcccagccaagatctgtcttccttcatggtgcctccagggagccttcctggtcccaggacctctggtggagggccatggcgtggaccttcacccttctggactgtgtggccatgctggtcatcggcttgcccaggctccagcctctccaagattctgaggggtctcagcccaccgcccttggtgccttctttgtagagcaccgctacctccctctccccgttgatgtccattccattccccaggtgcctccttcccaactgggggtggttaaagggagccccactgctgctacctggggaatggggcacctgggggccaaggcagagggaagggggtcctcccgattagggtcgagtgtcagcctgggttctatcctttggtgcagccccattgccttttcccttcaggctctgttgctccctcctctgcagctgcacgaaggcgccatctggtgtctgcatgggtgttggcagcctgggagtgatcactgcacgcccatcgtgcacacctgcccatcgtgcacacccacccatggtgcacacctgtagtcctccatgaggacatgggaaggtaggagttgccgccctgggggagggtcccgggctgctcacctctccccttctgctgagcttctgcgcacccctccctggaacttagccatactgtgtgacctgcctctgaaaccagggtgccaggggcactgccttctcacagctggccttgccccgtccaccctgtgctgcttcccttcacagcattaaccttccagtctgggtcccactgagcctcaagctggaaggagcccctgcgggaggtgggtggggttgggtggctgctttcccagaggcctgagccagaaccatccccatttcttttgtggtatctccccctaccacaaaccaggctggaacccaagccccttcctccacagctgccttcagtgggtagaatgggcccagggcccagctttggccttagcttgacggcagggccctgccaattgcaggagggtttggttcccactcagcttctgccggtcggcagcctgggccaggcccttttcctgcatgtgccacctccagtgggaaacaaaactaaagagaccactctgtgccaagtcgactatgccttagacacatcctcctaccgtccccaaatccccctgggcaggaggcagtggagaaccaagccccatggcctcagaatttccccccagttccccaagtgtctctggggacctgaagccctggggcttacgttctctcttgcccagggtgggcctggtcctgagggcaggacaggggtttggagatgtgggcctttgatagacccacttgggccttcatgccatggcctgtggatggagaatgtgcagttatttattatgcgtattcagtttgtaaacgtatcctctgtattcagtaaacaggctgcctctccagggagggctgccattcattccaacaaaaaaaaaaaaaaaaaaaaaaaaa

SEQ ID NO: 57339 - DNA, 5316 bp, Homo Sapiens; identical to SEQ ID NO: 30972

SEQ ID NO: 57340 - DNA, 3558 bp, Homo Sapiens
cataacaagccaaacgccagaccgagagtgcctccgtgcgcgagtgcccggtgtgtgcgcgccggcgagagcaggggcccgcccggctccccgcccgccgcggcccgaactcatgcagctccgagcgagcgagcggcgcccagcccagcgcctcggccgaacccctccgcagcaggctgcctgctgtttcccggggagatcatgaaacgaggtcgccttcccagcagcagtgaggattctgacgacaatggcagcctgtcaactacttggtcccagaattcccgatcccagcataggagaagctcctgctccagacatgaagatcgaaagccttcagaggtgtttaggacagacctgatcactgccatgaagttgcatgactcctaccagctgaatccggatgagtactatgtgttggcagatccctggagacaggaatgggagaaaggggtccaggtgcctgtgagcccggggaccatccctcagcctgtggccagggttgtgtctgaagagaaatccctcatgttcatcaggcccaagaagtacatcgtgtcatcaggctctgagcctcccgagttgggctatgtggacatccggacgctggctgacagcgtgtgtcgctatgacctcaatgacatggatgctgcatggctggaactgaccaatgaagaatttaaggagatgggaatgcctgaactagatgaatacaccatggagagggtcctagaggaatttgagcagcgatgctacgacaatatgaatcatgccatagagactgaggaaggcctggggatcgaatatgatgaagatgttgtctgtgatgtctgccagtctcctgatggtgaggacggcaatgagatggtgttctgtgacaaatgcaacatctgtgtgcaccaggcctgttatggaatcctcaaggtaccagagggcagctggctgtgccggacatgtgccctgggggttcagccaaaatgtctgctgtgtccgaagaagggtggagctatgaagcccacccgtagcggaaccaagtgggtccacgttagctgtgctctgtggatccctgaggtgagcattggcagcccagagaagatggagcccatcaccaaggtgtcacacattcccagcagccggtgggcgctagtgtgcagcctctgcaatgagaagtttggggcctctatacagtgctctgtgaagaactgccgcacagccttccatgtgacctgtgcttttgaccggggcctggagatgaagaccatcttagcagagaatgatgaagtcaagttcaagtcctattgcccaaagcacagctcacataggaaacccgaggagagtcttggcaagggggctgcacaggagaatggggcccctgagtgttccccccggaatccgctggagccctttgccagccttgagcagaaccgggaggaggcccaccgggtgagtgtccgtaagcagaagctgcagcagttggaggatgagttctacaccttcgtcaacctgctggatgttgccagggctctgcggctgcctgaggaagtagtggatttcctgtaccagtactggaagttgaagaggaaggtcaacttcaacaagcccctgatcaccccaaagaaagatgaagaggacaatctagccaagcgggagcaggatgtcttatttaggaggctgcagctgttcacgcacctgcggcaggacctggagagggtaatgattgacactgacaccttatagtgacttagagaagaagatgcaaagaggcgaacgctcgcccagagcaagaaatgatagccagtcatatactctcagacccttgtacacaccacagcatgaggttgtgttggttaaaaatatttatgggctggtaaactcattgtacatatgtgcaaaactgctactgagtggggagcttctttgtggttttttttttttaaaaacactttcccattaatctttactgttttgtaagatcaaatggggtgtgtcttccccacccccattccttcattctagagctagagtgaatgagccccaagaaaatgacccaaggagttgactcaggatggtttacagactgatttagaaaaccagaacggatttcatttctaatggagggggccagagatgggaaaatttcttgttcagtccggggaaacacacctaggtgctggtgatgggcttatgaaggaagctaagcacggctgctcactggcccccactttgtttcttgggtaattcacaggggaattcccagtactgtcatggagcagagcaggcagtgggtgctgatgtgtgtgcatgagctgtatgtacacatgcatatatctgttacagaagatactcctggcagtgaggtgctaagtcatcactgaggctgtgtgtgtgtgtgtgtgtgcgcgtgcccgtgtccatccatgtctctgttgtgtgtctgtgtgcgggtatgggtgggattcctggtggacaggggtgtcagatctgtctgaggagccccagtcatgctcagcacgctacagatgtgttgtttgtcacactgagattgctgaatgtcgtggctgttggctgccgagcctcagctgctggcatttccttctgctgtttgctgcttttgtgcctcccccactttccatcacctctggagtcccgtctggacgtcccttcctgctacaggaataatgaggcgtgggctgcctcccgctagggcctcctgctccctgtaggtagtttctggctgaggcttgctaattggggatgcttcttagagcatcttccacatcaactcccctggctgctggctaccgattaaattcattagtgtgaaagaggtgggagtgaggttttctggcctgaagcagtctgcactgaaaggtacccaagtggcctgaaacagtgtagggaaagacctgggaaacactggaccaaaaaagcctgatctcatggagacctgcatggccctgttagagatggcgtagaagtgaaagtcttaaagggagcattagagatccttttaatacacgactgagtgccagcttatttgtgatgccccttcccagaccaggttaggattcctgggaaggccgcggattccggccctggaagaggcaggatcctggagcagttttgtgaggcttttgtgctcccatacgccccctggtggtgagtgtaaagaagactttgcctctcacaactacatgtatgtgtggcatttttgttagagatgagaaaaggattgagaaggataaactggaatcctggtaagaagcctttatgccagcccgacacctgctgtaattggggtgcatgagctatggagtcagatagttgttgggagggggaggacaagaagtctattgtttggactgtgtttgtctcacaatcaccacaaaataaaagtgtagaaaatgcttgtggtgtactaactcttttctgtacttaagttactcagattaacatgcacttctaattctaaacattttttttggagtcatcactgtcgctgtttaagtagaacaatgccaacgatgtatgagaaacagggaataaatcaggatttgtgtgtgt

SEQ ID NO: 57341 - DNA, 5428 bp, Homo Sapiens
ctccctctcctatcggagcacaatgaaagcctgtgtatcgccgtgactccgggcgggagccagtgtcagcaaagcggctaacaacagacgagaaagagaaaggaaaatacaagctactttttttttccatctataaagcggagcaaatacaggagatagaaccagattgcttattgcgagtccagaccctcagatccactggccggggatggaatgtacaaaagtggacagaaaagtggctggacatgactcggtgcaatttgctggaagtttgtaagtttgaccatcgtttgtaaattactctcggaagagtttgtctctcttgatactgtattagaatagagccgggggtgaggaatagaaacgtaagcgggaaagaaaaaaatgtgttgaaggatctctctcagtggctagcgacttaagattgcttttcatttaaggctaggaaaccttagagggagtgaggattttaccggtgattggattagctgaagaaaaaagcatggtccaaaagtccaattactgacattgttaacagttgaaaagctgtctccctcttttgggagaagacaacatcctacagtaccccaaagaggagaaaacaccggagcgaaaggaaagggaggaaaaattaaaagccaaaagacagtctcccttgatttttgcacattttgaacagtgacttaaacatcttctgaaacagcactgttttgttttgttttggttttttatttaacctgaggaaaagtcaaggctgctggttacatagacatggtagaaatgtgtttctctgcagaaacatccccataaagaattgtcggaaacaactaggtgagggggagtcctctctattaatacctctctcaataccttttgctgtgtgtttctgtctcttgctggacaatccctgaattcttgatctaacccccagatcgtgtgtttacaaagtacctagtggctcttgtcagcttggtggaggaaaaaaaatccaccaactctgtccaacttctccagagctgtcaaatgcaattagagtaagttaatcagggtttgtttccaacttatcctccccccagttggtttctattctttctccccaccctctttttactaactcccctcccccacaacttctccacggctcccccacaacctctgaagacctctattcatgtggccctgaacactgagctcacattgtcaaaaacagacttgcctgcaatagccagcagtagcctctttccacctcaccatcccagaggcagcaatcattgtgtccggtaagatgggggacacagcgcccccgcaggcccccgcaggagggctagggggggcctctggggcggggctccttggagggggctcagtcaccccgagagtgcacagtgctatcgtggagcgcctccgggctcggatcgctgtctgccgccaacaccacctgagctgtgaaggacgatatgaacgaggtagggccgagagctcagaccgggaaagagaaagcaccttgcagctcctgagccttgtacagcatggccagggggcaaggaaagctggcaaacacaccaaggccaccgccactgctgccaccactacagcccctccaccgccccctgctgcccctcctgcggcctcccaagcagcagcaacagcagccccaccgcccccaccagactatcaccatcaccaccagcagcacctgctgaacagtagcaataatggtggcagtggtgggataaacggagagcagcagccgcccgcttcaaccccaggggaccagaggaactcagccctgattgcgctccagggttccttgaaaagaaaacaggtagttaacctatctcctgccaacagcaagcgacccaatggctttgtggacaactcatttcttgatatcaaaagaattcgtgttggggagaatctctctgcaggacaaggtggcctccaaataaacaatggacaaagtcagattatgtcagggaccttgcctatgagccaagcacccctgcgaaagactaacactctgccatcccatacacattctcctggcaatggcctgtttaacatgggcttaaaggaggtaaagaaggagccaggagagactctgtcttgcagtaagcacatggatggccaaatgacccaagagaatatttttcctaataggtacggagacgaccctggagaacaactgatggatcctgagctgcaggaactgttcaatgaactgaccaacatatctgtgcctcccatgagtgaccttgaactggagaacatgatcaatgccaccataaagcaggatgacccatttaacattgacttgggtcagcaaagccagaggagcacacctaggccctccttacccatggagaaaatagtgatcaaaagtgaatactcaccgggcttgactcagggcccctcaggctctcctcagctgaggcccccatcagctggccccgcattctccatggccaactctgccctctccacttcgtctccaatcccttcagtccctcagagccaggctcagcctcagacaggctccggagcaagccgggccttgccaagctggcaggaagtatcccatgcccagcagctcaaacagatagctgctaatcgtcagcagcatgcccggatgcagcagcaccagcagcagcaccagcctaccaactggtcagccttgccctcttctgctggaccatcaccaggtccatttgggcaggagaaaatccccagcccttcttttggtcagcagacattcagcccacagagctcccccatgcctggggtagctggcggcagcggccagtcgaaagtaatggctaactacatgtacaaggccggcccctcagcccagggtgggcacctagatgtcctcatgcagcaaaagcctcaggatctcagtcgaagttttattaacaacccgcacccagccatggagccccgtcagggcaacaccaagcctttgtttcattttaactcagatcaagcgaaccagcagatgccttctgttttgccttcccagaacaagccttctctcctacactacacccaacagcaacagcagcaacagcagcagcagcagcagcagcagcagcagcagcagcagcaacagcagcagcagcagcaacagcaacagcaacagcaacagcagagttcaatttcagctcaacaacagcaacagcagcagagctcaatttcagcccaacagcagcagcagcagcaacaacagcagcagcagcagcaacaacaacagcaacaacagcagcagcagcagcagcaacaaccatcttctcagcctgcccaatctctaccaagccagcctttgctaaggtcacctttgccacttcagcaaaagctcctacttcagcaaatgcagaatcagcccattgcaggaatgggataccaagtctcccaacaacagagacaggatcaacactctgtggtaggccagaacacaggccccagtccaagtcctaacccctgctcaaatccaaacactggaagtggttacatgaactcccagcaatcactgttgaatcagcaattgatgggaaagaagcagactctacagaggcagatcatggagcagaaacagcaacttcttctccagcagcagatgctggctgacgcggagaaaattgctccacaagatcagataaaccgacatttgtcaaggccacctccagattataaagaccaaagaagaaatgtgggcaatatgcaaccaactgctcagtattctggtggctcatccacaataagcttaaactctaaccaggctttggcaaacccagtttcaacacacaccattttaactcccaattccagcctcctgtctacttctcacgggacaagaatgccatcattatctacagcagttcagaatatggggatgtatggaaatctgccttgtaatcaacctaacacatacagtgtcacttcaggaatgaatcaattgacccaacagagaaacccaaagcaattgttagcaaatcaaaacaaccctatgatgccacggccacctaccttagggccaagtaataataacaatgtagccacttttggagctggatctgttggtaattcacaacaattgagaccaaatttaacccatagtatggcaagcatgccaccacagagaacatcaaacgtaatgatcacatccaacacaactgcaccaaactgggcctctcaagaaggaacaagcaaacagcaagaagccctgacgtctgcaggagtccgcttccccacaggtacacctgcagcctataccccaaatcagtcactgcaacaggcagtaggtagccagcaattttcccagagggcagtggctcctcctaaccagttaacaccagcagtgcaaatgagacccatgaaccaaatgagccaaacactaaatgggcaaaccatgggtcccctcaggggtctgaatctcagacccaatcagctaagcacacagattttgcctaatttgaatcagtcaggaacagggttgaatcagtcgaggacgggcatcaaccagccaccatccctgacgcccagcaattttccttcacccaaccaaagttccagggcttttcaaggaactgaccacagcagtgacttagcttttgacttcctcagccaacaaaatgataacatgggccctgccctaaacagtgatgctgatttcattgattctttattgaagacagagcctggtaatgatgactggatgaaagacatcaatcttgatgaaatcttggggaacaattcctaaagaagaaagggaagacaatttacaaactccaagcactaaaaggcagtatattacagaaactctgtagaggctgaactgttgatgttcaggtggactacatgaagataacatgcttaaaaatggaaagcagaaagtaactgcagtgatgaacattttggtccaaattcttgttttaaatcttacacctgaaagtaaaatattgggatcacttttccctgtctaaactccaggatacagtatccaatttatccaaacagaactgtggtgtcaatgtgtaattaattgtgtaaaatagccttcccaagtttctttttccctggaaaataaaaaaggtaatagaacttgtagtttatttaaaccccatgtcatgaggaggtactagttccaagcaacaaactccttaatttgctctaatagataggtatggtttaatctttccattgtgtcttttcatttaattttcctgaagcttgcaggatagattgaaatgttataggtttgtttggagtaaccaaacagtatgcaaattaagaaaaagccagagaacctagaaaacatccagtggattacagaatttcttccccatattcactcctcacttttacaattttcccacaatcctctacttcagtgggatgctgtgtctagtgattaaacaaaaatatagagctg

SEQ ID NO: 57342 - DNA, 4733 bp, Homo Sapiens; identical to SEQ ID NO: 29420

SEQ ID NO: 57343 - DNA, 8138 bp, Homo Sapiens
cctgcggcgctggagccttgacgcacggagctcgagagcgagaacgggagagaaaggggtagaaatggcggctccgctcggctcccgctgaggagggcgaagccggcggagtgtctgtgctgccggtctgcagcaccgcccccgcttcccgcacgccgcctgctcacgccgacttcccttcctctgcccggctctctcttgtgctcgtctgcgctccgcacgctccgggccggctcgtctctcattgcccggctcggctccgctggccctgactgaccggccggcgggccggccttgctcggctctcccgggcgcggcgtggactccgtccccctggctggaccatggtgaacacccggaagagctctctccgccttctcgggtccaagtctcctggtcccgggcctgggcctggggccggagcagagcctggggcgaccggaggcagcagccatttcatctcctctcggacccgctcctccaagacccgcgccgccagctgccccgccgccaaagccgggggaagcggtggcgccggcgtcactctggatgaggccaggaaagttgaagttgatggtagtttaagtgatagccacgtatctcctccagccaaacgcactttgaaacaacctgattctgtttgcaaagacaaatcaaaatcacgaagtactggtcagcgagaggaatggaacttatcaactggacaggccaggttaacttctcagcctggtgctacattaccaaatggacatagtggcttatcccttcgaagccatccccttcgaggggaaaagaagggagatggggacctttcttgtataaatggtgacatggaagtcagaaaaagttgtcgttccaggaaaaacagatttgaaagtgtgaaccagagtttgttatttgatcaactagtaaatagcactgctgaagctgtactacaggaaatggacaacattaacatccgacagaatcgtcgatcaggagaagtagaacgacttcgaatgtggacagatacagaatttgaaaacatggatatgtattcaagagtgaaaaggcgaagaaagtcactaagaagaaatagttatgggatacaaaatcatcatgaagtttctactgagggtgaagaagaagctagaacctctaaattgcttcctttggagaaaatcagtatagaatctcaagaggaggatggagatatagaagttgaagaggcagaaggagaagaaaatgatagaccatataatttgagacagagaaaaacagtggatcgataccaagcacctccaatagtaccagctcatcaaaaaaagagggaaaacacgctgtttgatattcatagatctccagcaagaagaagccatattaggagaaagaagcatgccattcatagtagtgacacaacttcttctgatgaggaacgctttgaaagaaggaaatcaaagagcatggcaagagcaagaaatagatgtttgcctatgaacttcagagcagaggacttagctagcggtattctccgagaacgagtgaaagtgggtgcaagcttggctgatgttgatccaatgaacattgataaatcagtacggtttgatagcataggtggattgagccatcatattcatgcgctaaaggaaatggtagtattcccacttttatatccagaaatttttgaaaagtttaaaattcagcctccaaggggctgtttgttttatggccctcctggcacaggtaaaaccttggttgccagagcattagctaatgaatgcagccaaggagacaaaaaagtggctttttttatgcgaaaaggagcagattgtttgagcaagtgggttggtgaatctgaaaggcaacttaggcttctttttgatcaggcatatttgatgagaccttctataatattttttgatgaaatagatggattagctccagttcgctctagcagacaagatcagatccacagctctatagtatcaaccctccttgctcttatggatggattagataataggggtgaaattgttgttattggtgctacaaacagacttgactctatagatcctgcactcaggagacctggtcgttttgacagagaattcctcttcaacctgcctgatcaaaaggcaagaaaacacatcttacagatccataccagggactggaatccaaaattgtcagatgcatttttaggtgaattggctgaaaaatgtgttggctactgtggagccgatatcaaggccctgtgcactgaagccgccctgattgcactgcggaggcgttatccccagatctatgctagcagtcataaactgcagctggatgtttcctcaatagtgcttagtgcccaagatttttaccatgcaatgcagaatatcgtgcctgcttcccaacgtgctgtgatgtcttcagggcatgcactatcccccatcataagaccactgctggaaagaagcttcaacaacatcctagcagtcttgcaaaaagtgtttcctcatgctgaaattagccagagtgacaaaaaagaagatatagaaactttaattttagaggatagtgaagatgaaaatgctttatcaatttttgagaccaattgtcactcaggatcaccaaagaaacagtcatcatctgctgctatacataaaccctaccttcattttacaatgtcaccatatcatcagccaacctcttacaggccacgcttattgctctctggagaacggggctcaggtcaaacttctcaccttgctccagcacttttgcacactctagaaagattctctgtgcatagactagatctcccagcactttattcagttagtgccaaaacacctgaggaatcatgtgcacagatttttcgtgaagctcgaagaacagtacctagtattgtttacatgcctcacattggggattggtgggaagctgtcagtgaaactgtgagagcaacttttctgacattgctacaagatataccatcattttcacctatatttttattgtctacctctgaaaccatgtacagtgaactgcctgaagaggttaaatgtatctttagaatacagtatgaagaggtcttgtatattcaaaggcctattgaagaagacagaagaaaattttttcaagaattgattctcaatcaggcatcaatggctccaccacgaaggaaacatgctgctctttgtgctatggaagtgcttcctcttgcactaccttctccacctcgtcaattatcagaatcagaaaaaagtcgaatggaggaccaggaggaaaatactttaagagagttgcggttgtttctcagggatgtaaccaagaggctggccacagataaacgctttaacatcttcagcaaaccggtggatattgaagaggtttcagattatcttgaagtaatcaaggaaccaatggacttatcaacagtaataactaaaattgataaacataattacctgactgcaaaggatttcctgaaagatattgacctcatctgtagcaatgctttagagtataatccagataaggacccaggagataaaataattaggcacagggcttgtaccctgaaggacactgcacatgctatcattgcagctgaattagatccagaatttaataaactttgtgaggaaattaaggaagcaagaataaaaagaggcttatcagtaacatcagaacaaataaatcctcatagtactggagctcggaagacagaaactagagtcgaagaggcatttcggcacaaacaaagaaatccaatggatgtgtggcacaactctgcaaataaatgtgcatttcgggttcggagaaaatcaaggcggagatcacagtggggtaaaggaattattaagaaaaggaaagttaataatttaaaaaaagatgaagaagacaccaaatttgcagactatgagaaccatacggaggacaggaaattattagagaatggagagtttgaggtaagcactgactgccatgaggaaaatggagaagagactggagacttatctatgaccaatgatgaatcatcctgtgacatcatggacttggaccaggggcagaggcttaacaatggagcaggcacaaaagagaactttgcatctactgaggaggaaagttcaaatgaatctctactggtcaacagcagcagttccttaaacccggagcagacctccaggaaagagactttccttaaaggaaattgtctaaatggtgaggcttccactgacagttttgaaggaataccagttctggaatgtcagaatggcaagcttgaagtagtttctttctgtgatagtggagataaatgtagttctgaacaaaagattcttctggaggaccagtcaaaagaaaaaccagaaacttcgactgaaaatcatggagatgatcttgagaaactagaggcactggaatgtagcaataatgagaagttagaacctggctctgatgtggaggttaaagatgcagaactggataaagaaggtgcttctaaagtaaagaaataccgtaaattaattttagagcaggcaaaaacgacaagcctggaactggttccagaagagccatctgagcctgtgcctcctcttatagttgatcgtgagagattgaagaaattgcttgatttgttggtggataaaagcaacaatctggcagttgatcagcttgagagattatattctcttcttagtcagtgtatctaccgtcatcgtaaagattatgacaaatcacaacttgtagaggagatggaaagaacagttcatatgtttgagacattcctatgaacttttcaagatgagtggtttatcctctccaatctgctcctcacagagcagtcttctgagccattcaatttcaaattgcaccaattatgtgcagagccttggtgtaaagtgctctctcactcattctttctctctgttgaatttggtgctattgtctcaggtacctgaaaccaaccagcctacaagaaccaaacagaacttcagaaacatgttgtattttccacaaataaaaaatacaaccccacagcttggagattttggtgctacagaaactgctctcgcttctgctcctctttttgtgcactctcttttggagactcctctcttagggagcagaccagcaaacaggaggaaactggatgggggcagttctaactgtgttgaattgtttaaacagtgggcaacttgttatttttttttcctccattttacccctttaatcatatttttcccccatctgggtaatggactgaaacctgttttagagttggctatggtctgttctggtgggaagctgaagaaactggatgaaattaggtcaggctctttagaactgcctttaacgtgcctttttattcatttgaggaagataaggctaaaaggatgggctgtttgaagcaaataaattagaaatatttctttggtcacaaccttgaaaataagttttgatactctatgtcattaagagacaaccagtgtttgggtatgaaatgcctgtcttattctcaaagctcaatcaagacacccagtaagccacataatatactaaaatggtaagttttcttgtaaggtctgttttggtttaagaaacatgaataacaacaaagaataatacacagtccacacacaaaaaaacaaaaaacaaaactgcacacgttttggtattgccaacaatgatgactagaaaataaatagatagtggccattttttcttctgtcagtggcaatttaatagttattcatgtttgagttcccagagaaaaatggttttcatatgtagtaaattgttgttttgttttaaagccaggacttgccaaatggacagaaaagagaggaattcatcagaagctccataaaattcattttctgtatgcttaattgcaaacgagctctggtatggtccttgaataacagtattaatgtttaaatcccatctcctaagcttaccttcacaactcttctttttgattggaaaccattttgaatcttgttgagtgatttctgtgaattgtatgtatctgaaattaattatgggttactagttttacaaaaactttctacaaatttggagacacagtctaggcagttgcaatgaggcaaaggatgcagtgactttttttatcagatgatttttaaacaaaaagaaaattttgccagcaagttggcttggtatcttcattcattgtagccgttagctgcaggtgtgtctttccaatatatgcaacacatgtagtttgggttttaattagggcgaatggtcttggactactgcagagattctgagctacctcagctttttgtattttagttaccaacagtgtttacagagtcttgtaatcactttgccaccgtttacatcctgaagctaaggtacttgtctccttgtctttggctctttgtagtgtgcagaaagcatactttggccatagcctactgcagtaatccaaagtgcttctttgcatttacatttacatctaacgccttctaattctagcttaatttttttttaaatgccacgtgttttctttgtacctagtctgtgaagtttctgtaatatccagttagtcatacaagtcaagatgctacccatgtagacacactgtatttttaaggtgggcaagtgcgattaacgatgaaccattttaaaggggaggttatttgaaacctctaatttgattattgggaggattttcatgctttctttagtatttattaccatcataccgattcaaactattttattgtctaatacattagcattttgtattttgatggaaattgttacagaatttaaagatttgatgaaataagatgtagcagattttttgtagcaagtttctggtaaaagggttttttgcaagtctcaggttcttgctgcactatttttttttaaatatttattccagttattctaattcagaagcattcttttcaagtaacagcagcacttgtgaaaggaaaaaaaaatgcacatgtttcttagtaggttactaaatttgtacaattaattaagattttagccatcagtgagtttgaaaagggaaatgtatttattttcagcattaaaatgcttccaaaagatcaagttgcttttgtttgtttgtttttttaaccgtaatgtagatggagaaattggaggcaacctcagtataggaactgccactttgaacagtttaggtcttaaagagaaagtcaatctaatgccaaggggagaacaatgagctgaaattgtaccaactcctctggccctccttccctcaattaaaaaaacacacttaccagttttgcttattttacagatatctggtggttctatagtttaaagcagcttgtgaaattaaaaaagtggactcaattttgtttacctttctgtaagtttttcatttttgctgtatagcattggcaaaaatatgtacaaattgacctctgttcttatttcctattgtgagcattataaagataagctcctatgtaaaaccttgctctcagatgagtaaaatatgtatcacagcatagctcagcaataattcatgctcagctgtggggaccctgggggctttttgaagatgatggaaccgcactagggttgaaactgatggctgtggagttaattgtgttttcgagcttgaatctcacctgtgattttttttttttaatgttgtttcatgacttgatttttctcataagccaatgtatttgtaggtttactggattttatttttagggagtgggtaatttcttcccttttttgattaagttggttcagctatggtgctattcagtaggtatcttcagtgtcaggtcccgtagctgaatgccattgttattataattattatttgtaatcacattgtaagcttgaatttgggcttgtacctgcatcttttgtattctgtacatctggttacttagactttgggagtccaatttggtttcagtcatgtatgtctactttgtagtttaagtagacttcatcaactatggtctattttgggtttgtagttttaatttagaattgtgttaaattgatgttttgcatttgacttcatttgacattagttgaagtaaattatttaatttttgaattctggaatttgaacatttactgtaatttgtaatataactgctgtgaaatacttgaataaagatgacaag

SEQ ID NO: 57344 - DNA, 3252 bp, Homo Sapiens
cgcacggcctggtttgcacccctggtttagggtcttcggccccggctctggcgtccctggctgccaagcctgaggcccgcagtcctactcccgccgagacccgccgctccggtcctgccccgaactgcccacggccggcagcgcttccaggccctgaaaaaaactctcttcctgtgtctggccagaggtatagagagagacaggttcaactctaaggcctgaaaaggaacaaggcccaccggaagcaatggccactgtccctggcctccagcccctgccaaccttggagcaggacctggaacaggaagagatcctgattgtgaaggtggaggaggacttctgcttggaagaggagccctccgtggagacggaggaccccagccctgagactttccgccagctcttccggctcttctgctaccaggaggtggctgggccccgggaggccctgagccgcctctgggagctgtgctgccgctggctgcggccggagctgcgcaccaaggagcagatcctggagctgctggtgctggagcagttcctgactgtgctgccgggggagatccaggctcgggtacgcgagcagcagccggagagcggtgaggaggccgtggtcctcgtggaagggctgcagcggaagcccaggaaacacaggcagcggggctcagagctgctttctgatgacgaggtgcccctcgggatagggggacagttcttaaaacaccaggcagaggctcagccagaggatctgtccctggaggaagaggctcgattctccagccagcagcccccagcccagctgagccacaggccacagaggggcccgctgttgtggccagagagaggccctccagctccccggcatcaggagatggcgtcagcctcgcccttcctttcggcctggtcccaggtgcccgtgaacttggaggacgtggctgtatacctttctggggaggagccaagatgcatggacccagctcagcgggacgcgccgctggagaatgaaggacctgggatccagttggaggacggcggtgatggcagggaggatgccccgttgagaatggagtggtaccgagtgctctcggcacgatgccaggggcctggccacccgctcccaggtcagaggccagccccagtcaggggcttggtcaggcctgatcagccaagaggcggccccccaccaggaagacgggcttcccatggggctgacaagccgtacacctgccccgaatgtggcaaaggcttcagcaagacgtcccacttgaccaagcaccagcgcacacacacgggcgagcggccttacaagtgcctagtctgtgggaagggctttagcgaccgctccaacttcagcacgcaccagagggtgcacacaggcgagaagccctacccgtgccccgagtgtgggaagcgcttcagccagagctccagcctggtcatccaccgcaggacacacagcggggagcggccctatgcctgcacccagtgcgggaagcgcttcaacaacagctcgcacttcagcgcccaccgccggacgcacacaggtgagaagccctacacctgcccggcctgtggccggggcttccgccggggcaccgacctgcacaagcaccagcggacccacatgggggcaggctccttgccgacgctccagccggtggctcctggaggccccggtgcaaaagcctgatcaccaggcctgaaactccctttccaggactctcatccctgggcacagaattcaggaaactgctagacagcctggtccgaaagcattgccagctgcccgtttcctcccatggcccagtatgaggccagcaggggacatttgggatgcccaggccgcagaggaagctgggcactgggtgcagaacaagggcaaggacaggctctgagtgtccagtggcagccagaacaggtgacacagagcaggggcttcagccacagagacacactcaggaggccagaagccgacactcaaggtgttcgtggggctggctcctgaagggcctgggagggtccatcagctgcctccagcatccagtggctgctggcatacagcctcatccccacgtcccaacccctctcctgtgtgtctgtgaccctgtgcgctgtctctgtgtgtaccccccacctgctcccccccccttttttttttgagacggggccttgctgtgtcccccaggcgggaatacagtgccatgatcatagctcactgcagcctcgaatccctgggctcaagtgttcctcctgcctcatcctcctgagtagctggggttacaggtgtgtgccgccatgcccagtctcttttttggtagggccaccactcactgggtttagggtcccccaatacactgtgacctcatcttaactaattatatcatcaaaacccgtgtttccaaataaggtcacattctgaggtctgggtgcacatgaatttgagggacccctcgtctgctgcagggagccctgctgtaccccagccttcccaggacgtggtctccagcttcttcatcctgccagagtttccaaatggagcccggggctctgcagcattccagtcccctttgcagatccatagctgctctgcagggcggaagacacctggggcgggaaagcacccctgagttccatcttcctgacatgttgcctgggatgtgacgggcctgacatctccccagggccggggcccagggctgcgtttgctcctggccccttagtgtctggaatgtggccttccacggttgccccactttgtctttctaaggtaagaagccttcaccttccagcttttgtctggcctgtgctgcgtgggagccactggtctgtgcacatccacggtgggtgagtggccaagacaagcagtgtgatagagtccttggtgggtttagtcatctcggaagtcgtagggcagctatggaaaccactgggttctggaacgttccagccaggcagtggttgttcctcataggtaggtggccttggccttcatcccagcctgggatgctccattgcatttgtcacctagtcactgtatatacgtgcacatttgaccttttggcacagcccaggttccaggtgcgtgacctgccctttttctcattcccttaactgacattatttagtgtcagaggccgagcacagtggctcccacctataatcctagcactttgggaggccaacgcgggtggattgcttgagcccaggagttcaagagcagcctgggcaatatagaaagacctcttccctacc

SEQ ID NO: 57345 - DNA, 4004 bp, Homo Sapiens
gagaggagtgttttcttgcatccagaaaagacctgagaggcggacgacacctgtgctccgcagagcagaacgtgggaggaacggcgggatgttaaggagctcaagaagcagagagtctacctgcccgacgcgttcgtggagaggagcagcggttgctgttggaggaggtgggtgcaaggacggcagatggcatccctgagaggtggtgactgagactagatgcgggtgcaggtccatctccactggtggctgtggtggctttggattgttggaagaccatcaccttcagcaggtctgcacttgggaacaatcattctcccccagcccgagcgtgcctctgccctctgtatcattgacagaggctgtatgtttggaaagagaactttgtgactgcagaactgacagttgactctaattcttgctaccaagtttttccccgacccagtgaaagagtgttaagacttcgacctaggacacattgagaaccaaggccaagactggacagggccatataactgggcttcaaccatggctgggactaagaataagacaagagcccaggccaaaactgaaaaaaaggctgctatacaagctaaagctggagcagagagggaggctactggtgttgttaggcctgtagccaagaccagggccaaagcaaaagccaagacagggtctaagacagatgcagtagcagagatgaaggcagtgtctaagaacaaggttgttgctgagacgaaggaaggagctctgtcagagcctaagactctgggcaaagccatgggagatttcactcccaaggctgggaatgagtccaccagctccacatgtaaaaatgaggctggtactgatgcctggttctgggctggggaagaggccactatcaattcctggttctggaatggagaagaggctggtaatagtttcagcactaagaatgataaacctgaaattggtgcccaggtctgtgctgaggagttggaacctgcggctggggccgattgcaaacctaggtcaggggctgaggaggaggaggaagagaatgttattgggaactggttttgggaaggagatgatactagttttgaccctaatcctaaacctgtgagcaggatagttaagcctcagcctgtgtatgaaattaatgaaaaaaataggcccaaggactggtctgaggtaactatctggcccaatgcccctgctgtaactccagctgtgttaggatttagatcacaggcaccatctgaggcaagccctccttcatatattgttctggcctccgctgaagaaaatgcctgttctttgcctgtggcaacagcttgccgcccttctaggaacactcgctcatgctcacagcctatccctgagtgtcgttttgattctgacccctgcatccagaccatagatgagattagacgtcaaatcaggatcagggaggtaaatgggattaagccatttgcttgtccttgcaaaatggaatgctatatggattctgaggaatttgaaaaacttgttagcttacttaagtcaactactgatcctcttattcataaaatagcacggattgcaatgggtgtccataatgttcacccatttgcccaagagtttattaacgaagtaggtgtagtgacacttattgaaagcttgctcagttttccttcccctgaaatgagaaaaaagactgtaattactctgaatcctccttctggggatgaaagacaacgcaaaattgaattacatgttaagcatatgtgtaaagaaaccatgtcatttcctttgaactcaccgggacagcaatctggattaaagatactaggacaactgactactgattttgtccatcactacattgttgccaattacttttcagagcttttccatttgctgtcctcaggaaattgcaaaaccagaaatcttgttttgaaactacttttaaatatgtctgaaaatccaactgcagccagagacatgatcaatatgaaggcattggcagcattaaaactcatctttaaccagaaagaggcaaaagccaatcttgttagtggtgtggccatatttattaacataaaggagcatatcagaaaaggctcaattgtagttgttgatcacttgagttataatacactcatggccattttcagggaagttaaagagattattgaaacaatgtaaaatgagccagagatagaacattttaagccatcttcaaactctagcaggctgtacattacagtgtacacattatacactgcatctttaacacagagtcacctgtgacaggctctaggtttgagctagactattttgggggtatcaaatgaatattataccttgggctgaaaatgtttgatttttatcttgtctagattggcatatttttaacattttacttaagatagcaaaccagttcgttttaagtaagctaacttgttcattagtatctgtggcttaaaatggcaaaaaagaaaatatccttgagtttgtaatctagttacagaagtaaggcatacacacacacaaagataacagtacctagagagagagtgtgtgtgagtgtgcgtgtctctgtgtgtgcacgtgcacgctcatggccaaatgtgcgcactctacataaaggaggcaggagttcctataggctatttaatgtaagagaaactatttttctcctgttccagctgtatcagatactcgttccgcaacacagaaatgactcagaatctcagacaaaatgtattatttgttcaattttaattttgctactacattcataactcttaaattgttaggctgtttcatttacatcaaagttatctcacaaaagagaaggcaggaaacgttttgtgagtgcctattctatgtcaaacactgtgttggcaccatattttacaagtttttttcctcttctcacagtgatcttgtgagttagttacttatatttttattagaactcattattctgggtaccctccaatgagaattagagaggttaaataccttttcctagattcccacagcaggaaggtggcatagctgttttgtctgacaccagaacccatctcaccacactgctttacagtcttcctgaaggacattttgaggtgggggggccttcaaagctcagagactggtttgaatggtttaattttgcaatggatcatgtccatgccaggtgttacaattcttaacttcctccaaattcgtgtgtccattagacatttggctacatctggctggaggtcaggagaaaattctgaggtaaatagatggattttatctggcagtgtcgaaaatagtaggagcctaaaactttgttcaatgagtaagatgtagatttggagtcatcagcaggggaaacttgttagatgtcctttgtatctttttctatccatttgtattttttctttcccaaagagctgaaatcattttataccctgaatttaaaaggtaattgcttttttcctccttgcgaaatcataccttaatttttttttttttttttttaccatttatgatttattctcctatgtgtcatatgaaaggccaaggggctttatcttttactagtaggcaagcctgggcatttctgcatttgtgccagctaacactacaaaatagacttaattagagaaatttagacccagaattgcagcttcaacaacacaaaacaggaaagctagaagaggttgctgtgtcaacctacaagatagtgattcttggaagttggtatggaccagaaagcattcccaggacatttaggctatggctgagttctctaagactcagggtgggaattataatccctggtctaagctgatatgaaagtttctatgtgtgaaaatatggagttatatgctttgagattttctgccagttaaactaaaacaagatcatactgtaaatgtttgtaacttgcttccccccactgtatactgtaaacatctttgcatgtcaataaatatgcctctacaacataaaaaaaaaaaaaaataaaaaaaaaaaaaaaa

SEQ ID NO: 57346 - DNA, 2744 bp, Homo Sapiens; identical to SEQ ID NO: 23863

SEQ ID NO: 57347 - DNA, 4675 bp, Homo Sapiens; identical to SEQ ID NO: 31605

SEQ ID NO: 57348 - DNA, 11740 bp, Homo Sapiens; identical to SEQ ID NO: 23497

SEQ ID NO: 57349 - DNA, 1290 bp, Homo Sapiens
tgtgctgctctctgtggggtcctgtagacccagagaggctcagctgcactcgcccggctgggagagctgggtgtggggaacatggccgggcctccgaggctcctgctgctgcccctgcttctggcgctggctcgcggcctgcctggggccctggctgcccaagaggtgcagcagtctccccactgcacgactgtccccgtgggagcctccgtcaacatcacctgctccaccagcgggggcctgcgtgggatctacctgaggcagctcgggccacagccccaagacatcatttactacgaggacggggtggtgcccactacggacagacggttccggggccgcatcgacttctcagggtcccaggacaacctgactatcaccatgcaccgcctgcagctgtcggacactggcacctacacctgccaggccatcacggaggtcaatgtctacggctccggcaccctggtcctggtgacagaggaacagtcccaaggatggcacagatgctcggacgccccaccaagggcctctgccctccctgccccaccgacaggctccgccctccctgacccgcagacagcctctgccctccctgacccgccagcagcctctgccctccctgcggccctggcggtgatctccttcctcctcgggctgggcctgggggtggcgtgtgtgctggcgaggacacagataaagaaactgtgctcgtggcgggataagaattcggcggcatgtgtggtgtacgaggacatgtcgcacagccgctgcaacacgctgtcctcccccaaccagtaccagtgacccagtgggcccctgcacgtcccgcctgtggtccccccagcaccttccctgccccaccatgccccccaccctgccacacccctcaccctgctgtcctcccacggctgcagcagagtttgaagggcccagccgtgcccagctccaagcagacacacaggcagtggccaggccccacggtgcttctcagtggacaatgatgcctcctccgggaagccttccctgcccagcccacgccgccaccgggaggaagcctgactgtcctttggctgcatctcccgaccatggccaaggagggcttttctgtgggatgggcctgggcacgcggccctctcctgtcagtgccggcccacccaccagcaggcccccaacccccaggcagcccggcagaggacgggaggagaccagtcccccacccagccgtaccagaaataaaggcttctgtgcttcctttaaaaaaaaaaaaaaaaaaaaaaaaaaaaaaaaaaa

SEQ ID NO: 57350 - DNA, 2560 bp, Homo Sapiens; identical to SEQ ID NO: 31354

SEQ ID NO: 57351 - DNA, 4563 bp, Homo Sapiens; identical to SEQ ID NO: 31687

SEQ ID NO: 57352 - DNA, 14036 bp, Homo Sapiens; identical to SEQ ID NO: 31337

SEQ ID NO: 57353 - DNA, 1787 bp, Homo Sapiens; identical to SEQ ID NO: 27023

SEQ ID NO: 57354 - DNA, 1989 bp, Homo Sapiens
ggcacagagaaccctgcttcaaagcagaagtagcagttccggagtccagctggctaaaactcatcccagaggataatggcaacccatgccttagaaatcgctgggctgtttcttggtggtgttggaatggtgggcacagtggctgtcactgtcatgcctcagtggagagtgtcggccttcattgaaaacaacatcgtggtttttgaaaacttctgggaaggactgtggatgaattgcgtgaggcaggctaacatcaggatgcagtgcaaaatctatgattccctgctggctctttctccggacctacaggcagccagaggactgatgtgtgctgcttccgtgatgtccttcttggctttcatgatggccatccttggcatgaaatgcaccaggtgcacgggggacaatgagaaggtgaaggctcacattctgctgacggctggaatcatcttcatcatcacgggcatggtggtgctcatccctgtgagctgggttgccaatgccatcatcagagatttctataactcaatagtgaatgttgcccaaaaacgtgagcttggagaagctctctacttaggatggaccacggcactggtgctgattgttggaggagctctgttctgctgcgttttttgttgcaacgaaaagagcagtagctacagatactcgataccttcccatcgcacaacccaaaaaagttatcacaccggaaagaagtcaccgagcgtctactccagaagtcagtatgtgtagttgtgtatgtttttttaactttactataaagccatgcaaatgacaaaaatctatattactttctcaaaatggaccccaaagaaactttgatttactgttcttaactgcctaatcttaattacaggaactgtgcatcagctatttatgattctataagctatttcagcagaatgagatattaaacccaatgctttgattgttctagaaagtatagtaatttgttttctaaggtggttcaagcatctactctttttatcatttacttcaaaatgacattgctaaagactgcattattttactactgtaatttctccacgacatagcattatgtacatagatgagtgtaacatttatatctcacatagagacatgcttatatggttttatttaaaatgaaatgccagtccattacactgaataaatagaactcaactattgcttttcagggaaatcatggatagggttgaagaaggttactattaattgtttaaaaacagcttagggattaatgtcctccatttataatgaagattaaaatgaaggctttaatcagcattgtaaaggaaattgaatggctttctgatatgctgttttttagcctaggagttagaaatcctaacttctttatcctcttctcccagaggctttttttttcttgtgtattaaattaacatttttaaaaagcagatattttgtcaaggggctttgcattcaaactgcttttccagggctatactcagaagaaagataaaagtgtgatctaagaaaaagtgatggttttaggaaagtgaaaatatttttgtttttgtatttgaagaagaatgatgcattttgacaagaaatcatatatgtatggatatattttaataagtatttgagtacagactttgaggtttcatcaatataaataaaagagcagaaaaatatgtcttggttttcatttgcttaccaaaaaaacaacaacaaaaaaagttgtcctttgagaacttcacctgctcctatgtgggtacctgagtcaaaattgtcatttttgttctgtgaaaaataaatttccttcttgtaccatttctgtttagttttactaaaatctgtaaatactgtatttttctgtttattccaaatttgatgaaactgacaatccaatttgaaagtttgtgtcgacgtctgtctagcttaaatgaatgtgttctatttgctttatacatttatattaataaattgtacatttttctaatt

SEQ ID NO: 57355 - DNA, 2061 bp, Homo Sapiens; identical to SEQ ID NO: 29620

SEQ ID NO: 57356 - DNA, 4846 bp, Homo Sapiens
gaaaatcaaaccctccggaatgtccccctgaagaggaccactgttgcagcggggaccctcctttcaggcatcctcattttatcatgtccctttgctttcttccccagtggccttttcaaaggtcagagagaaatgcttagtcaaacccctacttgagtatcacaggtgactaattttgggatcgaagattaaggaggttttgttgcgtccttaaagaacttggaattggagtccaggtagttttggaaaacttcctggagaaggatggattttaccctgtaaaagaagaaagacatggatgcataagaagagggttgaagagggggaggcctcagacttctcgctggcctgggattcctccgtgacagcagcaggaggcctagaaggagagccagagtgcgatcagaaaaccagccgtgcgctggaagacaggaacagcgtgacaagtcaagaggagagaaatgaggatgatgaagacatggaggatgaatcaatttacacctgcgatcactgtcagcaggacttcgagtctctggcagacctgacggaccaccgggcccaccgctgtcctggagatggtgatgacgacccacaactctcctgggtggcctcgtctccctccagcaaggatgttgcgtcacccacgcagatgatcggagatggttgtgacctcggcctcggcgaggaggaagggggcacgggcctgccatacccttgccagttctgcgacaagtccttcatccgcttgagctacttgaagaggcacgagcagatccacagcgacaagctgccgttcaagtgcacctactgcagccgcctcttcaagcacaagaggagccgcgaccggcacatcaagctgcatacgggcgacaagaagtatcactgccacgagtgcgaggcagccttctcccgcagcgaccacctcaagatccacctgaagacccacagctccagcaagcccttcaagtgcactgtgtgcaagcgcggcttctcctccaccagctcgctgcagagccacatgcaggcccacaaaaagaacaaggagcatctggccaagtcggagaaggaagccaagaaggacgacttcatgtgcgactactgcgaggacaccttcagccagacggaggagctggagaagcacgtgctcacccgccacccgcagctgtccgagaaggcggacctgcagtgcattcactgccctgaggtcttcgtcgacgagaacacactgctcgcccatatccaccaagcccacgccaaccagaaacacaagtgccccatgtgccctgagcagttctcctcagtggaaggtgtctactgccacctggacagccaccggcagcccgactccagcaaccacagtgtcagtcccgaccctgtactgggcagcgtggcctccatgagcagcgccacacccgactccagcgcctctgtggagcgtggctccaccccggactccaccttgaagccgctgcgggggcagaagaagatgcgggatgacgggcagggctggaccaaggtggtctatagctgcccctattgttccaagcgggactttaacagcctggccgtgctggagatccacctgaagaccatccacgcggacaagccccagcagagccacacatgtcagatctgcctggactccatgcccaccctctacaacctcaacgagcacgttcgcaagctgcacaagaaccatgcctaccctgtgatgcagtttggcaacatctctgccttccactgcaactactgccccgagatgttcgccgacatcaatagcctgcaggagcacatccgcgtctcccactgcggccccaacgccaacccctctgacggtaataatgctttcttctgcaaccagtgctccatgggtttccttactgagtcctccctcaccgagcacatccagcaggcccactgcagtgtgggcagtgccaaactagagtctccggtggtgcagcccacgcagtccttcatggaggtctattcctgcccctactgcaccaactcccccatctttggctccatcctgaaactcaccaagcacatcaaggagaaccacaagaacattccactggcccacagcaagaagtccaaggccgagcagagcccagtctcgtccgatgtggaggtgtcttccccgaagcggcagcggctctcagcaagcgccaactccatctccaatggggagtatccttgcaatcaatgcgacctcaagttctccaactttgagagcttccagacccacctgaagctgcacctggagctgctgctgcggaagcaagcgtgcccccagtgcaaagaggactttgactcccaggagtccctcctgcagcacctgacagtgcattacatgaccacgtcgacccactatgtgtgcgagagctgcgacaagcaattttcctcggtggatgacctgcagaagcacctgctggacatgcacacctttgtgttgtaccactgcaccctgtgtcaggaggtcttcgactccaaggtgtccatccaggtgcacctggcggtgaagcacagcaatgagaagaagatgtaccgctgcacggcctgcaactgggacttccgcaaggaggctgacctgcaggtgcacgtcaaacacagccacctgggcaacccggccaaggctcacaagtgcatcttctgtggggagaccttcagcaccgaggtggagctgcagtgccacatcaccacacacagcaagaagtataactgtaagttctgcagcaaggccttccacgccatcatcctgctggagaagcacctgcgggagaagcactgtgtgtttgatgctgcgaccgagaacggcacggccaatggggtacccccaatggccaccaagaaagctgagcctgctgacctgcagggcatgctgcttaagaaccctgaggcacctaacagccatgaggccagcgaggatgacgtggacgcgtcggagcccatgtacggctgtgacatctgtggggcggcctacaccatggaggtgctgctgcagaatcaccggctgcgggaccacaatatccggccgggcgaggatgatggctcacgcaagaaggctgagtttatcaagggcagtcacaagtgcaacgtttgttcacggactttcttctcggagaacgggctacgggagcacctgcagacgcaccggggccctgccaagcactacatgtgtcccatctgtggtgagcgcttcccttcgctgctgacgctcaccgaacacaaggtgacccacagcaagagcctggacacgggcacctgtcgcatctgcaagatgcccctgcagagcgaggaggagtttattgagcactgccagatgcaccctgacctgcgcaactcactcacgggcttccgctgtgtggtctgcatgcagacagtcacttccacgcttgagctcaagatccatggcaccttccacatgcagaagctggcgggcagctcagcggcgtcctcccccaatggccaggggctgcagaagctctacaagtgcgccctgtgcctcaaggagttccgcagcaagcaggacctggtgaagcttgacgtcaatgggctgccctacggcctctgcgccggctgcatggcccgcagcgccaacggacaggtgggtggcctggccccgcccgagcccgccgaccggccctgtgccggcctccgttgccccgagtgcagtgtcaagtttgagagtgccgaagacctggagagccacatgcaggtggaccaccgtgacctcacgccggagaccagtgggccccggaaaggcacccagacatcgccagtgccccggaaaaagacataccagtgcatcaagtgccagatgaccttcgagaacgagagagagatccaaatccacgttgccaaccacatgattgaggaaggcatcaaccacgagtgtaagctgtgcaaccagatgttcgactccccggccaagctcctctgtcacctcattgagcacagcttcgagggcatgggcggcaccttcaaatgccccgtgtgtttcacagtcttcgtccaggccaacaagttgcagcagcacatctttgccgtgcacgggcaggaggacaagatctacgactgctcacagtgccctcagaagttcttcttccagaccgagctgcagaaccacacgatgagccagcacgcacagtgagggatcgctcaacaggacacctctccgcagaaggcttgccggagacgccgtggggagggccatttgaacattacatccaatcaaagtgtcatttgcaacccagatgtaaaactctaatgatttggccatgaggcgctgctattataagcagctggaaatgaatattaatggcagagattaaaagtattccatgctcagtattttttattgtcctgctacagctagtgtgcttttagactttccgccgcagactacatttctagagttagagaaacctgctttttaaggctattgtcctttgttccttcatgtattatattgatagtttttaaaaaagaattagtgtgattttttttctttgcttcttttttttctttcttgtttttcttcccccccaccccccacccccttcggttaactactttttaattgcaattctaggtaattgtgcatcgtgatgtgattgcttggctattgtctgaatatttccttttaattttttaattaaagactaatgctttgattggatttgccagttcaccggacagtgattaaaactatgtaatgaatataatcggtttcagtgcaactggatggtctgcttttaaatgtgacttaatctgactgcagtaactagtacagttcaataaagggaatccatgcgaaaaaaaaaaaaaaaaaaaaaaaaaaaaa

SEQ ID NO: 57357 - DNA, 1642 bp, Homo Sapiens
gctctgcgttgggccagcccctcacagctggtttcttaccacgtattgcgcaagcggaatctatgcctgttacccacactccctgcgcccccgcaccccgctcctgtgcgcaagtcggaatataaaaccgcggaggagtgagctcttggggtgtccagttggttgccgcggcagtctctccgagcagcgcatttgtcttctaggctgcttggttcgtgcctccgagaaaggggtctcctgctgccagctaagtgtgggagaacttgtgcacgtatctcccctccgaatcccaacgatgggtaacgccagctttggctccaaggaacagaagctgctgaagcggttgcggcttctgcccgccctgcttatcctccgcgccttcaagccccacaggaagatcagagattaccgcgtcgtggtagtcggcaccgctggtgtggggaaaagtacgctgctgcacaagtgggcgagcggcaacttccgtcatgagtacctgccgaccattgaaaatacctactgccagttgctgggctgcagccacggtgtgctttccctgcacatcaccgacagcaagagtggcgacggcaaccgcgctctgcagcgccacgttatagcccggggccacgccttcgtcctggtctactcagtcaccaagaaggaaaccctggaagagctgaaggccttctatgagctgatctgcaagatcaaaggtaacaacctgcataagttccccatcgtgctggtgggcaataaaagtgatgacacccaccgggaggtggccctgaatgatggtgccacctgtgcgatggagtggaattgcgccttcatggagatttcagccaagaccgatgtgaatgtgcaggagctgttccacatgctgctgaattacaagaaaaagcccaccaccggcctccaggagcccgagaagaaatcccagatgcccaacaccactgagaagctgcttgacaagtgcataatcatgtgagccctgggccttaagagccagctcttcctatcctgtagcgtgtagaaaacgtggactcatttcactatgttacatgtacatggttgattttgtgctgttgtttggactgtaacatccatgttgtcaatacgtataccttgtaagtggataacttttctttttcccaggccagagaattcaaattgttaaaacattggcatttgaagaggagaacaaaatgtagcatgatgtatttaaagtaaggcctttagtaatgaatgtaatgagagaaaatgttttgaaaagaacaaaacatcaaaatgaatagaaagaaaaattggaaggcgtccttttggtaacccgattattgtgtattacctttaaatatttcacatcctgtaagtgcttaatcatatcttttaattgtgtatttaagaaaagtgttttcacaacaaaagcttttgataaattgctgcgtgacatatactaaataaaaaaatgaatatgttgatcattaggggtgtgggagcagagaaaattgtgaaagtgactctcactaaagatgttagtagtttctcatgtcatttaaaaatgtttgagtattctgcatagcagtttgtaaaagtgtaacagcttattgacttaataaagcttttcctgcatgcaaaaaaaaaaaaa

SEQ ID NO: 57358 - DNA, 1096 bp, Homo Sapiens
agtgctgctgcagctctgagcattcccacgtcaccagagaagccggtgggcaatgagatcatgtctgctttcaggttgtggcctggcctgctgatcatgttgggttctctctgccatagaggttcaccgtgtggcctttcaacacacgtagaaataggacacagagctctggagtttcttcagcttcacaatgggcgtgttaactacagagagctgttactagaacaccaggatgcgtatcaggctggaatcgtgtttcctgattgtttttaccctagcatctgcaaaggaggaaaattccatgatgtgtctgagagcactcactggactccgtttcttaatgcaagcgttcattatatccgagagaactatccccttccctgggagaaggacacagagaaactggtagctttcttgtttggaattacttctcacatggcggcagatgtcagctggcatagtctgggccttgaacaaggattccttaggaccatgggagctattgattttcacggctcctattcagaggctcattcggctggtgattttggtactgtttatttacatttgctaaattttctcgtggtatagttcacttataatgacatcactactgtgctttaaatatgtgtgtctttaatattttgctggttgcatgtattttctatttaatgttgcagttcatttagagtagagatgtacctcatttaacatagagatgtatttctaaaaacttgtgtctatatgtatttttttgttaaaaaattctacactttgttgttgacatgtcataattttagaaaaactttacttatacattgggttaaaattcattagctagtgtctcctactttcctaatactttagctttaaactagtaaactccaccttttgcctgtagtagtaaattgcttttaaatatttaaactaggtggtgaatggtgtttattaaacccttatggtcgatatttccttaaagtaaaacaaaaaacacctttggttatatggccagttctttcttaatttatatgtttcactaactaagatttttaaaagataattttttcttaaaaaaaaaaaaaaaaaaaaaaaaaaa

SEQ ID NO: 57359 - DNA, 872 bp, Homo Sapiens
atgggaaagagactgctcaaggagacatggattaacattaaacagaaacagcaaaagaaaatggagtgctggcgaacagagaccacgcagcggaaaaacagggcgggctcgaggcggggagaggggcggggctccagggacctgttgatcgcaggtgtcactggcctgactggtccctgggtattggggcgtatgcgcatgctccgctcacagggtcgggctctgggcggcggagaccagccgcctgtgctccagttcccggtgagcctcggtactgtggcagcagtcagtgtgtctggcgggtgtcggcgtgaagcggggctgggccagcgggaggtagctctgtgggagtggaaggcctgtatttctctacctggaccgcacgctcctcgcgcaaggagggtagagctcaagttccgtgatgatggtctaagcaaagacccttcgtcctgttaaagataaattaaaaaaaaaaaaaaaaaaccaaagggaacaaaacttactctgcaaaagtaatatatgatttacctgctgttgtcataagaattccaaatagacaaactcggtatgcttgggatttgctttacattctaagtggatttggagaagagacaataaagaataagcagtcaattctataatatatttagaaggagaaaagtgccaaggaggaatgaaaaagtagaacaaggcaaatgtggatatatgtttataactgcacaaatgaattctgaagggacgcataagacattggtattggttgcctatggggaatataattgatatgggggagacttggttttccttgtatgctcttctatatggtttaaaaaattatttatgaaaattaaatatatactaaaaaagaggga

SEQ ID NO: 57360 - DNA, 1906 bp, Homo Sapiens
agtctctggattaggcaggcagaggcagttatgggcttctgcagtggcgagaaaggaagcgcctgaagggtcgtgaggctggggcgggacccggcaccgctggggcggccaggccgtgaggacttcaatggcgagcagcgtggacgaggaggcgctgcaccagctgtacctgtgggtagacaacatccctctgtcccggcccaagcgaaacctctcccgggactttagcgatggagtccttgttgcagaggtcatcaagttttacttccccaagatggtggagatgcacaattatgtccccgccaactctctccagcagaagctcagcaactggggtcatctgaacaggaaggtactgaagaggctgaacttttcagtaccggatgacgtgatgcgcaagatcgcgcagtgcgccccaggcgtggtggagctggtgctcatcccgctgaggcagcgcctggaggagaggcagaggcgcaggaagcagggcgccggctccttacaggagctggctccccaggatggcagtggctacatggatgtgggtaaggtggccttttccatttctccctcccggttggagctttccttctgtccttcttcctgtcacttgtaagagtggaagtagggagggggaagcaggagaatgagactccagcacagtcattcctccacttgccttgtctcaggtgtatcccagaaggcccgaggtgaaggtgtcccggacccccagggagggggtcagctcaggtaaagaagctgggagttccagacttcaccaggctggtgatctctgcacacagctggggttggggggcacggtacgctgagcctgagacgggaggcaggaaaggggctagagggggagaagggaaggcctggtcgagggccctggaagggtgagtgtagggcccgaggtccaagcctccgctaagctgcttctcaccccagctgggaccggccaccggcgcctcagcctccagcgtataaccgggcgttgcagggcgaccccagcttcgtcctccagatcgctgaaaaggagcaggagctgttggcctctcaagagaccgtgcaggtcctgcagatgaaggtaaggcgcctggagcacctgctccagctcaagaatgtgcggatcgaagacctctcccggcggctccagcaggcggagcgtaagcagcggtgagcggcggcccgggccgcgcggggacgcccgggtacccgccagagccccgacgccgcgccggacccacccaccgatggatagaccattgggagggcggagcccgctgctctcacgagcctgctggggcccgagtgccctccttccttgggatgggtgagcgtgggaggagatgggacaggaactctaggagcgcaggcccgggactgagccgcctcctaccactccggagatccgggtcaggagaatggaccgctttccagagcccagaagccacgtgcagagacctagcctgtcccccaaagcagtgtccaacaccttgggcccggccttgcatctcccggcgctgggccttggggggcggtcccttggctctgtccacacccccagaatcaggtccccgcccagctccgaggacggcggcgtctccatccacgctagttccccatgccctcagccatgggggaatctgtcccgggccgctgaggggctcccctgcccctcctgggagcttacctgggacccacctcggcgacggagaccgcagcagctggagaggaaggggtgaggcgtgggatcgccaggagtagggaggacatcgacgatgtgcccgtagcagtcacccctccctcctcgcgcacggggtactgaggcggaaggtttgaaggttacggctcagggctgccccattaaagtcagtgttgtgttctaaaaaaaaaaaaaaaa

SEQ ID NO: 57361 - DNA, 3642 bp, Homo Sapiens
ggcacgagctttggctggctagggaggggatgcaatgatataaacatttatcccctgatacctcatgttaaaatctgatgcccactgtgggacgtggggcctaatggccaccatttgggtcatggtgaccaatcttttatgaatagagagatactgccctctcttgggaatgaatgaattgttgctttattattttccaagagagctagttgttaaaaagaccctggcaacttcctactctctctgttcctctgttaccatgtgttctctgcatataccagctcacctttgtcttctgccatgagtggaagcagcctgaggccctcactaaatgcgcaaacatttccagacatcagaatcttgagccacatgaaccttgtttatataaattagtcagtctcagacatttctttatagcaacacaaaatggaaaaagataacactcgcatcacaggtatgtgtctctggcagctagccaccgttcttaagatatccaggatccactcagccaagagtcttctcatcagtactctaaagacacttatcactcaagagagtctaaggtttttaggagaaaccagggacaaagtctaaatgtttttgtgataactcagattgcccacttttctttgaccacatatcttttacaggaaaaaggattgtaacagtaaagaggtattggcatattatcagagtctcatccattcattcaaaattaggccagtttatcatcctcttgtatgaatatgtctcccagaatgaaatcactcagctttgctgacaacactcaatcttaccaggttccaaaaacaagaatggtctcagggacatacagcttcactcttttaggcatccagtataattgacctaagtgacaatatcttctcttgctcacaccacctttgaggagttaagctaatattgaatttttctcattatataaccctttgatttattcacttgccctcagccactattcctccctctgtccctttatatcagttgtttccaggtttgggagtgacattaggtttgtctgctgggctggcctagactgcaggcagcaatagtattctagcatgtcttccctcagtctagtcttgatcatagagggtaggttatataggtaaggaactagtgggggctatcaagaccaccaggctatataactctacttactgttaatcctaacttttccagatgaaatgaatacttgagaattcttacataaaggtataaaaatatagttatggtttttggcttagggataattcctgtttctggcacttttatttacatccctattcctggtactatggcataacatatgaaaaaataaatttgaggtgaagtgtagtctttattccagcatcctctcctcttcagaagaattgtatgtatcgtcataacagcatcgtcctgatccatcaggtaaaagagaggatgctacctagtggagttattcttgcagccccactcatgttgacagcgagcacattcatgaagatataaaagccagtccttcatgtttatattgcccaacaattagattggcagtttttagacaaacaatgtttcaattgaccatttcaattttctatcaaattttcccctgaggaggacatgtccctctgcattgttggccatttgaggctgtaaagtgtgttttcttgtgtaaagaagtgtgactcggcagtccaaattggtgcaatctcttcttttctggttcttgtatagcccttgaagcattgacatctacccctggttgagcatagcccaatccagagtcagtgattttcctgtcaagatccattggcagctcctttggggttgctggcatcattctggcttgccaggtattatgatcaaagccttcccactagagaatctgtcacatctccatctgctgcctctgtctgttttcttgaccaacagtgaaaaaagagattatgagaaataagataaattaccaaaattgtgaacaaaagagagattatcactaatgacccttaggaagttaaaaaacattataagtgaatactctgaaaaacctgaagccaataagttagaccacttggataaaaaggaccaattcgtgcagagatagaaattgccaaaactgacccaaattaactggaaaacctgaagagaactgtgaactaagtcagaaattgaaaaaccttctcaaaaagaaatgccaaagcccagatatcttcactggtgaattctatcaaatattttgaaagctctttcagacaagaagagaggagggaagactttccagcccatttacagaactggcattaccctcatatcaaagtcacagcaagactcacaggaaaagagtgccatacaccagtgtcaccaataaacataaatgaaaacatccttaacaaacattggcagataatacaaagccacataaaaaaggattacactccatgaccaatgggattcatcccaggaacatatggttggattaacatttgaaaatcagttcatggaatgcactgtattaatggaaaaaaagacataattatctcaaaagatgcaggagaaacagttgacaaaaatgttaacatcactcatgttcataagtttcaacaaaataggaatggaggagaccttcttcactctgataaagggcgtctataaaaaacccacagctaaaatcaaacttaatgaagaaagactgaagactgaatgcttttctcctaagatggggatcaatgcaaggatgtccaatcccaccacttttatttaatattatactggagattgtatccagtgcaataaggcagaaaattaaaaattaaaggcatccagataaaaaggaaaacatacaattctattcacagataacatgaccctgtctgtagaattcacaagcagataaaaactggctagcactaataaatgaatccagaagggcccataggatatcaaatcaatataaaaattaattattaacatatttctctatagaagcaatgaaaatctcaactttcctatcacagtagttaccagaagagcgaaataggaataaatttaggaagacagcagtgtttgttcactgaaaataaaaaaacattcctcagagaaattaaaggtctaaataaatggagagatgcgagttggaaagctcgataatactgttaagatggcagttctcccccagtagatctataggttcaacacaatccctatcaaaatcccagcaggattttatagaaaattgacaaaataggccgggcgcggtggctcatgccggtaatcccagcactttgggaggctgaggcgggcggatcatgagatcaggagatccagaccatcctggctaacacggtgaaaccccgtctctactaaaaatacaaaaaattagccgggcgtggtggcaggctcctcgggaggctgaggcagaaaaatggcatgaacccggtaggcagaagttgcagtgagcggagatcgtgccactgcactccagcctgggtgacagagcgagactccgtctcaaaaaaaaaaaaaaaaaaaaagaaaagaaaaaaagaaaagaaaattgacaaaataatcctaaaaatgtatatgaaaatgcagaggatgcagaagggccaacacaaatttggaaaaaaaaaaaaaaaaaaa

SEQ ID NO: 57362 - DNA, 4105 bp, Homo Sapiens
gaattcgcggccgcctcttgcggtcccagagtggagtggaaggtctggagctttgggaggagacggggaggacagactggaggcgtgttcctccggagttttctttttcgtgcgagccctcgcgcgcgcgtacagtcatcccgctggtctgacgattgtggagaggcggtggagaggcttcatccatcccacccggtcgtcgccggggattggggtcccagcgacacctccccgggagaagcagtgcccaggaagttttctgaagccggggaagctgtgcagccgaagccgccgccgcgccggagcccgggacaccggccaccctccgcgccacccaccctcgctttctccggcttcctctggcccaggcgccgcgcggacccggcagctgtctgcgcacgccgagctccacggtgaaaaaaaaagtgaaggtgtaaaagcagcacaagtgcaataagagatatttcctcaaatttgcctcaagatggaaaccctttgcctcagggcatccttttggctggcactggttggatgtgtaatcagtgataatcctgagagatacagcacaaatctaagcaatcatgtggatgatttcaccacttttcgtggcacagagctcagcttcctggttaccactcatcaacccactaatttggtcctacccagcaatggctcaatgcacaactattgcccacagcagactaaaattacttcagctttcaaatacattaacactgtgatatcttgtactattttcatcgtgggaatggtggggaatgcaactctgctcaggatcatttaccagaacaaatgtatgaggaatggccccaacgcgctgatagccagtcttgcccttggagaccttatctatgtggtcattgatctccctatcaatgtatttaagctgctggctgggcgctggccttttgatcacaatgactttggcgtatttctttgcaagctgttcccctttttgcagaagtcctcggtggggatcaccgtcctcaacctctgcgctcttagtgttgacaggtacagagcagttgcctcctggagtcgtgttcagggaattgggattcctttggtaactgccattgaaattgtctccatctggatcctgtcctttatcctggccattcctgaagcgattggcttcgtcatggtaccctttgaatataggggtgaacagcataaaacctgtatgctcaatgccacatcaaaattcatggagttctaccaagatgtaaaggactggtggctcttcgggttctatttctgtatgcccttggtgtgcactgcgatcttctacaccctcatgacttgtgagatgttgaacagaaggaatggcagcttgagaattgccctcagtgaacatcttaagcagcgtcgagaagtggcaaaaacagttttctgcttggttgtaatttttgctctttgctggttccctcttcacttaagccgtatattgaagaaaactgtgtataacgaaatggacaagaaccgatgtgaattacttagtttcttactgctcatggattacatcggtattaacttggcaaccatgaattcatgtataaaccccatagctctgtattttgtgagcaagaaatttaaaaattgtttccagtcatgcctctgctgctgctgttaccagtccaaaagtctgatgacctcggtccccatgaacggaacaagcatccagtggaagaaccacgatcaaaacaaccacaacacagaccggagcagccataaggacagcatgaactgaccacccttagaagcactcctcggtactcccataatcctctcggagaaaaaaatcacaaggcaactgtgactccgggaatctcttctctgatccttcttccttaattcactcccacacccaagaagaaatgctttccaaaaccgcaaggtagactggtttatccacccacaacatctacgaatcgtacttctttaattgatctaatttacatattctgcgtgttgtattcagcactaaaaaatggtgggagctgggggagaatgaagactgttaaatgaaaccagaaggatatttactacttttgcatgaaaatagagctttcaagtacatggctagcttttatggcagttctggtgaatgttcaatgggaactggtcaccatgaaactttagagattaacgacaagattttctactttttttaagtgattttttgtccttcagccaaacacaatatgggctcaggtcacttttatttgaaatgtcatttggtgccagtattttttaactgcataatagcctaacatgattatttgaacttatttacacatagtttgaaaaaaaaaagacaaaaatagtattcaggtgagcaattagattagtattttccacgtcactatttatttttttaaaacacaaattctaaagctacaacaaatactacaggcccttaaagcacagtctgatgacacatttggcagtttaatagatgttactcaaagaattttttaagaactgtattttattttttaaatggtgttttattacaagggaccttgaacatgttttgtatgttaaattcaaaagtaatgcttcaatcagatagttctttttcacaagttcaatactgtttttcatgtaaattttgtatgaaaaatcaatgtcaagtaccaaaatgttaatgtatgtgtcatttaactctgcctgagactttcagtgcactgtatatagaagtctaaaacacacctaagagaaaaagatcgaatttttcagatgattcggaaattttcattcaggtatttgtaatagtgacatatatatgtatatacatatcacctcctattctcttaatttttgttaaaatgttaactggcagtaagtcttttttgatcattcccttttccatataggaaacataattttgaagtggccagatgagtttatcatgtcagtgaaaaataattacccacaaatgccaccagtaacttaacgattcttcacttcttggggttttcagtatgaacctaactccccaccccaacatctccctcccacattgtcaccatttcaaagggcccacagtgacttttgctgggcattttcccagatgtttacagactgtgagtacagcagaaaatcttttactagtgtgtgtgtgtatatatataaacaattgtaaatttcttttagcccatttttctagactgtctctgtggaatatatttgtgtgtgtgatatatgcatgtgtgtgatggtatgtatggatttaatctaatctaataattgtgccccgcagttgtgccaaagtgcatagtctgagctaaaatctaggtgattgttcatcatgacaacctgcctcagtccattttaacctgtagcaaccttctgcattcataaatcttgtaatcatgttaccattacaaatgggatataagaggcagcgtgaaagcagatgagctgtggactagcaatatagggttttgtttggttggttggtttgataaagcagtatttggggtcatattgtttcctgtgctggagcaaaagtcattacactttgaagtattatattgttcttatcctcaattcaatgtggtgatgaaattgccaggttgtctgatatttctttcagacttcgccagacagattgctgataataaattaggtaagataatttgttgggccatattttaggacaggtaaaataacatcaggttccagttgcttgaattgcaaggctaagaagtactgcccttttgtgtgttagcagtcaaatctattattccactggcgcatcatatgcagtgatatatgcctataatataagccataggttcacaccattttgtttagacaattgtctttttttcaagatgctttgtttctttcatatgaaaaaaatgcattttataaattcagaaagtcatagatttctgaaggcgtcaacgtgcattttatttatggactggtaagtaactgtggtttactagcaggaatatttccaatttctacctttactacatcttttcaacaagtaactttgtagaaatgagccagaagccaaggccctgagttggcagtggcccataagtgtaaaataaaagtttacagaaacctt

SEQ ID NO: 57363 - DNA, 3085 bp, Homo Sapiens; identical to SEQ ID NO: 31350

SEQ ID NO: 57364 - DNA, 5288 bp, Homo Sapiens
ggaccggaagtggggggcggaagtgcagtgggctcagcgccgactgcgcgcctctgcccgcgaaaactctgagctggctgacagctggggacgggtggcggccctcgactggagtcggttgagttcctgagggaccccggttctggaaggttcgccgcggagacaagtgagcagtctgtgccatagggattctcgaagagaacagcgttgtgtcccagtgcacatgctcgcatcgcttaccaggagtgcccgagaccctaagatgttcggagtggttttttcgcacagacccgaatagcctgcccctcagccacgctctgtgcccttctgagaacaggctgatatgcccaagatagtcctgaatggtgtgaccgtagacttccctttccagccctacaaatgccaacaggagtacatgaccaaggtcctggaatgtctgcagcagaaggtgaatggcatcctggagagccctacgggtacagggaagacgctgtgcctgctgtgcaccacgctggcctggcgagaacacctccgagacggcatctctgcccgcaagattgccgagagggcgcaaggagagcttttcccggatcgggccttgtcatcctggggcaacgctgctgctgctgctggagaccccatagcttgctacacggacatcccaaagattatttacgcctccaggacccactcgcaactcacacaggtcatcaacgagcttcggaacacctcctaccggcctaaggtgtgtgtgctgggctcccgggagcagctgtgcatccatcctgaggtgaagaaacaagagagtaaccatctacagatccacttgtgccgtaagaaggtggcaagtcgctcctgtcatttctacaacaacgtagaagaaaaaagcctggagcaggagctggccagccccatcctggacattgaggacttggtcaagagcggaagcaagcacagggtgtgcccttactacctgtcccggaacctgaagcagcaagccgacatcatattcatgccgtacaattacttgttggatgccaagagccgcagagcacacaacattgacctgaaggggacagtcgtgatctttgacgaagctcacaacgtggagaagatgtgtgaagaatcggcatcctttgacctgactccccatgacctggcttcaggactggacgtcatagaccaggtgctggaggagcagaccaaggcagcgcagcagggtgagccccacccggagttcagcgcggactcccccagcccagggctgaacatggagctggaagacattgcaaagctgaagatgatcctgctgcgcctggagggggccatcgatgctgttgagctgcctggagacgacagcggtgtcaccaagccagggagctacatctttgagctgtttgctgaagcccagatcacgtttcagaccaagggctgcatcctggactcgctggaccagatcatccagcacctggcaggacgtgctggagtgttcaccaacacggccggactgcagaagctggcggacattatccagattgtgttcagtgtggacccctccgagggcagccctggttccccagcagggctgggggccttacagtcctataaggtgcacatccatcctgatgctggtcaccggaggacggctcagcggtctgatgcctggagcaccactgcagccagaaagcgagggaaggtgctgagctactggtgcttcagtcccggccacagcatgcacgagctggtccgccagggcgtccgctccctcatccttaccagcggcacgctggccccggtgtcctcctttgctctggagatgcagatccctttcccagtctgcctggagaacccacacatcatcgacaagcaccagatctgggtgggggtcgtccccagaggccccgatggagcccagttgagctccgcgtttgacagacggttttccgaggagtgcttatcctccctggggaaggctctgggcaacatcgcccgcgtggtgccctatgggctcctgatcttcttcccttcctatcctgtcatggagaagagcctggagttctggcgggcccgcgacttggccaggaagatggaggcgctgaagccgctgtttgtggagcccaggagcaaaggcagcttctccgagaccatcagtgcttactatgcaagggttgccgcccctgggtccaccggcgccaccttcctggcggtctgccggggcaaggccagcgaggggctggacttctcagacacgaatggccgtggtgtgattgtcacgggcctcccgtaccccccacgcatggacccccgggttgtcctcaagatgcagttcctggatgagatgaagggccagggtggggctgggggccagttcctctctgggcaggagtggtaccggcagcaggcgtccagggctgtgaaccaggccatcgggcgagtgatccggcaccgccaggactacggagctgtcttcctctgtgaccacaggttcgcctttgccgacgcaagagcccaactgccctcctgggtgcgtccccacgtcagggtgtatgacaactttggccatgtcatccgagacgtggcccagttcttccgtgttgccgagcgaactatgccagcgccggccccccgggctacagcacccagtgtgcgtggagaagatgctgtcagcgaggccaagtcgcctggccccttcttctccaccaggaaagctaagagtctggacctgcatgtccccagcctgaagcagaggtcctcagggtcaccagctgccggggaccccgagagtagcctgtgtgtggagtatgagcaggagccagttcctgcccggcagaggcccagggggctgctggccgccctggagcacagcgaacagcgggcggggagccctggcgaggagcaggcccacagctgctccaccctgtccctcctgtctgagaagaggccggcagaagaaccgcgaggagggaggaagaagatccggctggtcagccacccggaggagcccgtggctggtgcacagacggacagggccaagctcttcatggtggccgtgaagcaggagttgagccaagccaactttgccaccttcacccaggccctgcaggactacaagggttccgatgacttcgccgccctggccgcctgtctcggccccctctttgctgaggaccccaagaagcacaacctgctccaaggcttctaccagtttgtgcggccccaccataagcagcagtttgaggaggtctgtatccagctgacaggacgaggctgtggctatcggcctgagcacagcattccccgaaggcagcgggcacagccggtcctggaccccactggaagaacggcgccggatcccaagctgaccgtgtccacggctgcagcccagcagctggacccccaagagcacctgaaccagggcaggccccacctgtcgcccaggccacccccaacaggagaccctggcagccaaccacagtgggggtctggagtgcccagagcagggaagcagggccagcacgccgtgagcgcctacctggctgatgcccgcagggccctggggtccgcgggctgtagccaactcttggcagcgctgacagcctataagcaagacgacgacctcgacaaggtgctggctgtgttggccgccctgaccactgcaaagccagaggacttccccctgctgcacaggttcagcatgtttgtgcgtccacaccacaagcagcgcttctcacagacgtgcacagacctgaccggccggccctacccgggcatggagccaccgggaccccaggaggagaggcttgccgtgcctcctgtgcttacccacagggctccccaaccaggcccctcacggtccgagaagaccgggaagacccagagcaagatctcgtccttccttagacagaggccagcagggactgtgggggcgggcggtgaggatgcaggtcccagccagtcctcaggacctccccacgggcctgcagcatctgagtggggtgagcctcatgggagagacatcgctgggcagcaggccacgggagctccgggcgggcccctctcagcaggctgtgtgtgccagggctgtggggcagaggacgtggtgcccttccagtgccctgcctgtgacttccagcgctgccaagcctgctggcaacggcaccttcaggcctctaggatgtgcccagcctgccacaccgcctccaggaagcagagcgtcatgcaggtcttctggccagagccccacaaggaccatgagggcgctggaggggccaggcctgtcgctgctgtgcctggtgttggcgctgcctgccctgctgccggtgccggctgtacgcggagtggcagaaacacccacctacccctggcgggacgcagagacaggggagcggctggtgtgtgcccagtgccccccaggcacctttgtgcagcggccgtgccgccgagacagccccacgacgtgtggcccgtgtccaccgcgccactacacgcagttctggaactacctggagcgctgccgctactgcaacgtcctctgcggggagcgtgaggaggaggcacgggcttgccacgccacccacaaccgtgcctgccgctgccgcaccggcttcttcgcgcacgctggtttctgcttggagcacgcatcgtgtccacctggtgccggcgtgattgccccgggcacccccagccagaacacgcagtgccagccgtgccccccaggcaccttctcagccagcagctccagctcagagcagtgccagccccaccgcaactgcacggccctgggcctggccctcaatgtgccaggctcttcctcccatgacaccctgtgcaccagctgcactggcttccccctcagcaccagggtaccaggagctgaggagtgtgagcgtgccgtcatcgactttgtggctttccaggacatctccatcaagaggctgcagcggctgctgcaggccctcgaggccccggagggctggggtccgacaccaagggcgggccgcgcggccttgcagctgaagctgcgtcggcggctcacggagctcctgggggcgcaggacggggcgctgctggtgcggctgctgcaggcgctgcgcgtggccaggatgcccgggctggagcggagcgtccgtgagcgcttcctccctgtgcactgatcctggccccctcttatttattctacatccttggcaccccacttgcactgaaagaggcttttttttaaatagaagaaatgaggtttcttaaagcttatttttataaagctttttcataaaactggttgtagttgc

SEQ ID NO: 57365 - DNA, 7751 bp, Homo Sapiens; identical to SEQ ID NO: 32261

SEQ ID NO: 57366 - DNA, 2274 bp, Homo Sapiens
cgcgccagcctcggcggtggcaagcgctgtcccccagcagaggtgtccctggatacaggatagcaaaacctgatctcataaaacctaggtcacaaaggacagccctgcaaaacagaccctatttggatcaagtgagccagttcctggaacctgaataatgactcctgaatcaagggatactacagatttgtctccagggggtacccaggagatggaaggcatcgtgatagtgaaggtggaggaggaagatgaagaagaccattttcaaaaggaaagaaacaaagtagagtcatcgccacaagttctcagtcgctctacaactatgaatgagagagccttattgtcatcgtatttagttgcatatagagtggcaaaagagaaaatggctcacacagcggctgaaaaaattatccttccagcatgtatggacatggtacggacaatttttgatgacaaatcagctgataaactaagaactatacctcttagtgataatacaatatctcgtcgaatctgtacgattgcaaaacatttggaagcaatgcttattacacggctgcagtccggtatagactttgcaatccaactcgatgagagcactgatattgcaagttgtcccacactcttggtttatgtcagatatgtgtggcaagatgattttgtagaggatctcttatgttgtttaaatttaaattcacatataactggattagatttatttactgaattagaaaactgccttcttggtcagtataaattaaactggaaacattgtaaaggaatttcaagtgatggaacagcaaatatgaccggaaaacacagcagacttactgaaaaattgttagaagcaacccacaacaatgctgtttggaatcactgttttattcatcgagaagctttggtatccaaagaaatttcaccaagtctgatggatgtattgaaaaatgcagtgaaaactgttaattttattaaaggaagctcactgaatagccgacttctcgaaatattttgttcagagattggagtgaaccacacccacttattgtttcatacagaagttcgttggctttctcaaggaaaagtattgagcagagtatatgaactcaggaacgagatttacatttttctcgttgaaaagcaatctcatttggcaaatatttttgaagacgacatttgggtaacaaaattggcatatttaagtgatatttttggcattcttaatgaattaagcctgaaaatgcaggggaaaaacaatgatatatttcagtatcttgaacatattctaggattccaaaagacgttattattgtggcaagcaagacttaaaagtaaccgccctagctactatatgtttccaacattattgcaacacatcgaagagaacattattaatgaagactgcttaaaagaaataaaattagagatattgttgcatctcacttctttgtctcaaacttttaattattactttccggaagagaaatttgaatcattaaaggaaaatatttggatgaaagatccatttgcttttcaaaacccagaatcaataattgagttaaacttggagcctgaagaagagaatgaattattgcagctcagttcatcattcacactaaagaattattataagatattaagtttatcagcattttggattaagattaaagatgactttccactgctaagtaggaagagtatattgctgttactaccattcacaactacatatttgtgtgaactaggattttcaatcttgacacggttaaaaacaaagaagagaaataggctcaatagtgcaccagatatgcgggtagcattatcttcatgtgttcctgactggaaggaacttatgaacagacaagcacacccatcacattaaatacaaactttacaaaattctgtgtatagccaggtgtggtggcttacgcctgtaatcccagcagtgggagaccgaggtgggcagatcacttgagttcaagaccagcctggccaacatggtgaaaccccatctctactaaaaatagaaaccttagccaggcgtggtggcacatgcctgcagtcccagttacttgggtgcctgaggcaggagaatctcttaaaccaggaaggcagagattgcagtgagctgagataatcccactgcattccagcctgggcaacagcgtgagacttcatctcaaaaaaaaaaaattgtatttgtacttttaaagggattttgcagtatgttgtagttaaacgttaataaaattatatttgtaattaggaaaaaaaaaa

SEQ ID NO: 57367 - DNA, 1744 bp, Homo Sapiens
ggcccccgccccttcgtgcgcgcgctgggcctagctgccgctcagggtcggggctgacccgtcactttcgggaacctcagtcccagcagcttctctccctcagccggcccgctcctggagagagacagaaacccttttctgtcgcgtcctctccttgcgagccgcagggggaccgagcggaggctattggagccgcagccccagaccagggcgcttgaccctctctcggaacggggcggggaaggggcgcgagtgacctcggggagggaagggcactggcaggaaaggacgcaactgcagatcggtagccggaggccgccacggataaaggctcactgatggctcagttgggagcagttgtggctgtggcttccagtttcttttgtgcatctctcttctcagctgtgcacaagatagaagagggacatattggggtatattacagaggcggtgccctgctgacttcgaccagcggccctggtttccatctcatgctccctttcatcacatcatataagtctgtgcagaccacactccagacagatgaggtgaagaatgtaccttgtgggactagtggtggtgtgatgatctactttgacagaattgaagtggtgaacttcctggtcccgaacgcagtgtatgatatagtgaagaactatactgctgactatgacaaggccctcatcttcaacaagatccaccacgaactgaaccagttctgcagtgtgcacacgcttcaagaggtctacattgagctgtttggactggaaaatgatttttcccaggaatcttcataaaagggaccctgagcaagaacatttttcatagcagacaggaggactcatccacatcgccagcaatcataattaagcaaaccgccttttgcaccatttaagatttaggaaatcatccaaattacttttaatgtttctgcagtagaaaatgaatctaaattcattttatagggtttgtagtcttttatctgttttggattcactgtgcttttaagaaaaagttggtaaatttgccgttgatttttctttttaacctcaaactaatagaattttataaaatattaattttctctagccattgtcttaggacttgtgacattacatgaacatttcaaagcactgaaaaaagacaaaggatccctaatgtccctgaagaggaaattaaaatacaaagttgtttttcattagcaaacttcttactttcttacagctaaacttggtagcttagtgaagtacagctgcttgtatggaggagctggggaaatatatttgctttgaaacttttttatttttacatctcagtcttgctagcaagcactacttggcttagaatctgtcatatccataaaggaggagctcatgtctctagtcctggcccttcaactcagaaggttcttctatactttccttctctcaggactcttatagcccagactttaaacatgaagctgcataattttcatcacttcttactctgccgcatcctctttgcccatgttattaaagtattatctaatactttgaagtttacctgaagaacctctttgtgtgtacttagtaatacaactttttttcctgtcccaacaccttttaatacagttgaatggataaaaacatggatacaaacacatggatatagttatcactgaagcagtgtgacataaaataatacctatgtatacaacactcctctgtaaatagcaaatgtaaagtaaaagatacacaacaga

SEQ ID NO: 57368 - DNA, 4223 bp, Homo Sapiens; identical to SEQ ID NO: 29802

SEQ ID NO: 57369 - DNA, 1328 bp, Homo Sapiens; identical to SEQ ID NO: 31578

SEQ ID NO: 57370 - DNA, 1695 bp, Homo Sapiens
gaggcacagataaagataagttttactgtcatgctgcttttaacataacagagcaacatcacctaggaaaaaagtttgtaggaggatttttaatccatatatttgtcttatggctagataaagatttctctgaaaaaaagaagcatgtcaggaatctctgggtgcccctttttcctctggggacttctagcattgttgggcttggctttggttatatcactgatcttcaatatttcccactatgtggaaaagcaacgacaagataaaatgtacagctactccagtgaccacaccagggttgatgagtattatattgaagacacaccaatttatggtaacttagatgatatgatttcagaaccaatggatgaaaattgctatgaacaaatgaaagcccgaccagagaaatctgtaaataagatgcaggaagccaccccatctgcacaggcaaccaatgaaacacagatgtgctacgcctcacttgatcacagcgttaaggggaagcgtagaaagcccaggaaacagaatactcatttctcagacaaggatggagatgagcaactacatgcaatagatgccagcgtttctaagaccaccttagtagacagtttctccccagaaagccaggcagtagaggaaaacattcatgatgatcccatcagactgtttggattgatccgtgctaagagagaacctataaactagctggaccatgatctagttcaatgatttggctcctattgaagatggcttctaagaaaacaagatgcacagaggacacagaaggacttggcagcagggtgatgacctgatcatttgttgatgggatggtggcttacctcttattcacagcttacacttatgcatgccaaatgtaaggccatgaaaatcagtatttcaaataacttaaaaaatgctttactactaaaatgtaaaaaattaatgtgctcacctcggcagcacatatactaaaaattaataagacccagcttgaaaattgagcctgataacaagattacaaattcacaatacctaatacttagggaaatataaaaatttaagcatgaatgcgttctggaacacgttagaagaaaaataaaagccaatgagtttttttttaattctcctttctcaccaatgggcaatagcccataattgaaataaatttctgattgaaaggtataggaaacattaaaatgcattactaagagaagtaatataattttcttacaaagtatttttcccaaagatagctttactatttcaaaaattgtcaaattaatgcatgctccttacaacaaacaaatatcaaaaagagtttaggaattctactagccagagatagtcacttggagaaactttctatatatccttctaaatatttttctgggcatgcttatgtatgtacatcagttgtttctttttattttgaaccaaaaatgtggtttcttttgtacacattacttaaactttctttccagtcaacaatatattgtggatttattttcactgttatatttaactatatataaatacgcatatattgtaattttaatgtctgcttagcaccccactgataaccaaatcacagtttatttaaataattttaatgacttttcaaaaacaatttattgatgcaaaaagcaaggttgagatgacaatgtttctttcaataattaaaaaatactgcttcac

SEQ ID NO: 57371 - DNA, 1451 bp, Homo Sapiens
atgttaaaaaccaagttcattggtcagcagtgtgtcaggttggatgctgtgggcgcctggcctctgaaggtcactcgaggctcactgtacagctgtcgcttgccaggcagcccgagagagttctggcgagggctgcgggaaggaaagggggcggcgtccttcacagggagggtgcagctgacctccctccccttgtgcagactggaaaagaatggcccagatcctctggactcctcagatgagcggattcagagagaagcttttgagagcgtgctggcggagacatttttcacaaaagagcccttgcggtgctggtgtccgtggcgtgcctgggaaggcccaccaacgctggccggcctccaagcacccgggcctctgctcatgtacagctcctgaactgccctgcctctgagttactgtggaaaatgagcttatatatgaagaagtcagcgagtggacaaagccaggcgcaatggatagcaaagatgtggaagtctcctcgattcaagttacaagaaaaccgcagcatggagtctgctctcagctgttggggaattaccgatgcctttgactaagtcaagactgacttttccagaatatcacccaagagatagagccgtccctgtccaagtttgtgcgctagcccttcatggaggtcagagaggaagaaacaaaggcagctgtggcctcggcggtcacagtgtcagaacgcacaagccccataaagaggtttcacgcaggccacccatcccttttcattctccagcagaacaggacagagagcgttctgttctgcggaaggtcttccactctacaaggcaatccctccagctgctttgctgtattgtgctgtctcctgtcacactatgaatgcagtgacctcagccagcaacagggagaacccccctgcctcccgaacaaaggacctcacgtgaaatcctgagctcagagcttacagatatgtgtgcgctttcactttacatcggccgtgacttccaaacaacttcaggaaactttaggatctctgaggtatactggagatgacagcagcgtagaatgttcatttggatttagaacagaaatgcttattttatatttggctgctcccaaactgtccccagacttcctctccagtggttaccctccactgccctggatgtcccacgtttacactccacactcacacctccaccttaacaaagtcctccactgggtcaaaccatacatcgcttcgtctctgtagtgatgacttcctgtcctctgctctgtggataaagaccccagataaagatgcctgtgttgctcaactcttgtaaatactcttgagacattttgaaagcagaaggaaaggagacagacggggaaaataaaagggatggtctgcttgtgcggaaacgttttgagaatgcccttccctaagagagaacagtaaaagtgagcaatacttcctg

SEQ ID NO: 57372 - DNA, 1927 bp, Homo Sapiens
ggagagggtgatgctggctccaagcctgactctgctctcgagagctccagcaggagaggcccttcctcgcctggcagcccctgagcggctcagcagggcaccatggcaagatcccttctcctgcccctgcagatcttactgctatccttagccttggaaactgcaggagaagaagcccagggtgacaagattattgatggcgccccatgtgcaagaggctcccacccatggcaggtggccctgctcagtggcaatcagctccactgcggaggcgtcctggtcaatgagcgctgggtgctcactgccgcccactgcaagatgaatgagtacaccgtgcacctgggcagtgatacgctgggcgacaggagagctcagaggatcaaggcctcgaagtcattccgccaccccggctactccacacagacccatgttaatgacctcatgctcgtgaagctcaatagccaggccaggctgtcatccatggtgaagaaagtcaggctgccctcccgctgcgaaccccctggaaccacctgtactgtctccggctggggcactaccacgagcccagatgtgacctttccctctgacctcatgtgcgtggatgtcaagctcatctccccccaggactgcacgaaggtttacaaggacttactggaaaattccatgctgtgcgctggcatccccgactccaagaaaaacgcctgcaatggtgactcagggggaccgttggtgtgcagaggtaccctgcaaggtctggtgtcctggggaactttcccttgcggccaacccaatgacccaggagtctacactcaagtgtgcaagttcaccaagtggataaatgacaccatgaaaaagcatcgctaacgccacactgagttaattaactgtgtgcttccaacagaaaatgcacaggagtgaggacgccgatgacctatgaagtcaaatttgactttacctttcctcaaagatatatttaaaccaacctcatgccctgttgataaaccaatcaaattggtaaagacctaaaaccaaaacaaataaagaaacacaaaaccctcagtgctggagaagagtcagtgagaccagcactctcaaacactggaactggacgttcgtacagtctttacggaagacacttggtcaacgtacaccgagacccttattcaccacctttgacccagtaactctaatcttaggaagaacctactgaaacaaaaaaaatccaaaatgtagaacaagacttgaatttaccatgatattatttatcacagaaatgaagtgaaaccatcaaacatgttccaaaagtaccagatggcttaaataatagtctggcttggcacaacgatgttttttttctttgagacagagtctctgttgcttgggctgcaatgcagtgatgcaatcttggctcactgcaacctccgcctcctgggttcaagtgattctcgtgcttcagcctcccaagtacctgggactacaggtgtgcaccaccacaccaggctaattttttgtgtatttttactagagacagggtttcaccatgttggccagcgtggtcttgaacgcctgacctcagatgatccacccaccttggcctcccaaagtgctgggattacaggcatgagccaccacggccagcccacaatgatattacaaacctattaaaaatgatacttagacagaattgtcagtattattcaagaacatttaggctataggatgttaaatgacaaaaggaaggacaaaaatatatatgtatgtgaccctacccataaaaaatgaaatattcacagaatcagatctgaaaacacatgtcccagactgcatactggggtcgtcatgaggtgtctccttccttctgtgtacttttccttgaatgtgcacttttataacatgaaaaataaaggtggggaaaaaagtctgaaga

SEQ ID NO: 57373 - DNA, 5190 bp, Homo Sapiens; identical to SEQ ID NO: 29836

SEQ ID NO: 57374 - DNA, 1944 bp, Homo Sapiens
ccaagatgggcgccatcttgcggtccttttcctggggccggtggtctggtaccctaaatctctcagtattgttgcccttggggctgcgtaaggcccactcgggcgctcaggggttactggcagcgcagaaggctcgaggtctgttcaaggacttcttcccggagacggggacgaaaatagagctcccagagctcttcgaccgtggcacggcgagttttccccaaaccatttactgtggcttcgaccccacggcagactcgcttcatgtgggtcatctacttgcgctgctgggtctgtttcatttgcagcgagcgggccacaacgtgatcgcgctggtgggaggcgccacggcggccctgggagacccgagcggccgtaccaaggaacgcgaggcgctggagacagagcgcgtgcgagccaacgcgcgagctctgcgcctagggcttgaggccctggcggctaatcaccagcagcttttcactgatgggcgctcctggggcagcttcactgtgctggacaactcggcctggtaccagaagcagcacctggtggacttcctggcggcagtgggggttcacttccgcatggggacgctgctgagccggcagagcgtgcagctgcggctcaagagccccgagggcatgagcttggccgagttcttttaccaggtgctccaggcctatgacttctattacctcttccagcgttatggatgcagggtccagctgggcggatctgatcaactaggcaacatcatgtccggatatgagttcatcaacaagttgactggagaagatgtatttggaatcaccgttactctaattacaagtacaactggagcaaagctgggaaagtctgctggcaacgctgtttggctaaacagagataagacatctccatttgaattgtatcaattctttgtcagacaacccgaggattcagtggaaaggtacctgaagctgttcactttcctgcccctcccagagattgatcatatcatgcagctgcatgtcaaagagccagaaaggcggggtcctcagaaacgactggcagcagaagtaacaaagcttgttcatggacgagaaggattggattctgctaaaaggtgtacacaagccctttatcacagtagcatagatgcactggaggtcatgtctgatcaggagttaaaagagttgtttaaagaagctccattttctgaattttttctcgatcctggaacaagtgtcctagatacttgccgcaaagcaaatgccattccagatggtccccgagggtatcgaatgataacagaaggcggagtcagcataaatcaccaacaagtaacaaatcctgagagtgttttaattgttggacaacatattctcaagaatggactttccttacttaaaataggaaaaagaaatttctacattataaaatggcttcagttgtgatgaaaagtccttctggttgtccaaataaacttacccatcattcattctcaagacctctgaagggttggctccagaacttagacctttgcttatgcaaatcagaaaaacagaatggactaggactcagtgtgagtaacttcattatttttatgggccggttaataaatatttgtttaataatgggatgttttattttctgatgtacaaagcttgattaccatagaaaaccatgattttcagggttaatctctttttaaaattatacttcagaagagaaagaaatgctgctttcctatcttacccttcctgctctcctttttgtagtgatgaggaacaatgaaaaagaggtagtgtaaggaattgtgaggctgggcatggtgtaagtgctccactttagagagtgtaccttaattactactgtatttgcaaattaagggaaatttaggtcatcatttgattttcggaaatctaaaaggaactgaccatcattaccaagtctttctatata

SEQ ID NO: 57375 - DNA, 10011 bp, Homo Sapiens; identical to SEQ ID NO: 23269

SEQ ID NO: 57376 - DNA, 1754 bp, Homo Sapiens
acagagctccctcccaggcccgcgaacttggccattcagccgccgctgtccccgctgcgcgccctcgcgcctctgcctgagaagccaggcgctgttcccccaccccagaagaggatggcaaaggtggctaaggacctcaacccaggagttaaaaagatgtccctgggccagctgcagtcagcaagaggtgtggcatgtttgggatgcaaggggacgtgttcgggcttcgagccacattcatggaggaaaatatgcaagtcttgcaaatgcagccaagaggaccactgcctaacatctgacctagaagacgatcggaaaattggccgcttgctgatggactccaagtattccaccctcactgctcgggtgaaaggcggggacggcatccggatttacaagaggaaccggatgatcatgaccaaccctattgctactgggaaagatcccacttttgacaccatcacctacgagtgggctccccctggagtcacccagaaactgggactgcagtacatggagctcatccccaaggagaagcagccagtgacaggcacagagggtgccttttaccgccgccgccagctcatgcaccagctccccatctatgaccaggatccctcgcgctgccgtggacttttggagaatgagttgaaactgatggaagaatttgtcaagcaatataagagcgaggccctcggcgtgggagaagtggccctcccggggcagggtggcttgcccaaggaggaggggaagcagcaggaaaagccagagggggcagagaccactgctgctaccaccaacggcagtctcagtgacccgtccaaagaagtggaatacgtctgcgagctctgcaagggagcggcccctcctgacagccccgtggtctactcggacagggcaggctacaacaagcagtggcaccccacctgctttgtgtgtgccaagtgctccgagccgctggtggacctcatctacttctggaaggatggtgcaccctggtgcggccgccattactgcgagagtctgcggccccggtgctccggctgcgatgagataatattcgctgaggactaccagcgtgtggaagatctggcctggcaccgaaagcactttgtctgtgagggttgtgagcagctgctgagcggccgggcgtacatcgtcaccaagggtcagcttctgtgcccaacttgcagcaagtccaaacgctcctgaagggctgcccacccacagccagaatccacaggatcccaccgagaaggagagccaggtgtgccgagaccatcctaagggtccgatgtgacagcaagcaagtgaaataaacaatgatttgcttttcagtgagaatatatatatgagatatatatagatatatattctaggttgggtggtggtagatccttgagggtcagtagtttcaaaaccaaaaatattctaagaagtcttaggatggagttccttttctttctgttgttgtttcccagctacaaccaactaaagacacaaatggcgttctgcaaggggactctgggaggagttttccagaatgcaattccgagtgagcaaatcgcatagctgtagaatgtgcgtgcttttttgtggacacaggagctcctccaggagcaggctgggatcccaactatcgcttgttgcctctttttcaagtggaatttgaattttaaataaacaactttttttggcatgataaacagatcaataaaagttttgtgaattccaaaaaaaaaaaaaaaaaaaaa

SEQ ID NO: 57377 - DNA, 2176 bp, Homo Sapiens; identical to SEQ ID NO: 25437

SEQ ID NO: 57378 - DNA, 2581 bp, Homo Sapiens
gaattcgcggccgctgccgttcaaacttgtcagtcaactcatgccagcagcctcagcgtctgcctccccagcacaccctcattacatgtgtctgtctggcctgatctgtgcatctgctcggagacgctcctgacaagtcgggaatttctctatttctccactggtgcaaagagcggatttctccctgcttctcttctgtcacccccgctcctctcccccaggaggctccttgatttatggtagctttggacttgcttccccgtctgactgtccttgacttctagaatggaagaagctgagctggtgaagggaagactccaggccatcacagataaaagaaaaatacaggaagaaatctcacagaagcgtctgaaaatagaggaagacaaactaaagcaccagcatttgaagaaaaaggccttgagggagaaatggcttctagatggaatcagcagcggaaaagaacaggaagagatgaagaagcaaaatcaacaagaccagcaccagatccaggttctagaacaaagtatcctcaggcttgagaaagagatccaagatcttgaaaaagctgaactgcaaatctcaacgaaggaagaggccattttaaagaaactaaagtcaattgagcggacaacagaagacattataagatctgtgaaagtggaaagagaagaaagagcagaagagtcaattgaggacatctatgctaatatccctgaccttccaaagtcctacataccttctaggttaaggaaggagataaatgaagaaaaagaagatgatgaacaaaataggaaagctttatatgccatggaaattaaagttgaaaaagacttgaagactggagaaagtacagttctgtcttcaatacctctgccatcagatgactttaaaggtacaggaataaaagtttatgatgatgggcaaaagtcagtgtatgcagtaagttctaatcacagtgcagcatacaatggcaccgatggcctggcaccagttgaagtagaggaacttctaagacaagcctcagagagaaactctaaatccccaacagagtatcatgagcctgtatatgccaatcccttttacaggcctacaaccccacagagagaaacggtgacccctggaccaaactttcaagaaaggataaagattaaaactaatggactgggtattggtgtaaatgaatccatacacaatatgggcaatggtctttcagaggaaaggggaaacaacttcaatcacatcagtcccattccgccagtgcctcatccccgatcagtgattcaacaagcagaagagaagcttcacaccccgcaaaaaaggctaatgactccttgggaagaatcgaatgtcatgcaggacaaagatgcaccctctccaaagccaaggctgagccccagagagacaatatttgggaaatctgaacaccagaattcttcacccacttgtcaggaggacgaggaagatgtcagatataatatcgttcattccctgcctccagacataaatgatacagaaccggtgacaatgattttcatggggtatcagcaggcagaagacagtgaagaagataagaagtttctgacaggatatgatgggatcatccatgctgagctggttgtgattgatgatgaggaggaggaggatgaaggagaagcagagaaaccgtcctaccaccccatagctccccatagtcaggtgtaccagccagccaaaccaacaccacttcctagaaaaagatcagaagctagtcctcatgaaaacacaaatcataaatccccccacaaaaattccatatctctgaaagagcaagaagaaagcttaggcagccctgtccaccattccccatttgatgctcagacaactggagatgggactgaggatccatccttaacagctttaaggatgagaatggcaaagctgggaaaaaaggtgatctaagagttgtaccacctatataaacatcctttgaagaagaaactaagaagcatttgcaaatttctcttctggatatttggtttattttttctgaagtccaaaaaattatcattacagtgtaccatattaagccatgtgaataagtagtagtcattatttgtgaaaaattcccaaaaagctggggaaaacaaatgtgtaacttttccagttacttgacacgattcagtgggggaaaaccagcattttttattctattgataccaaagcatttctaataagagcttgttaaatttaagaataaagttatttaaaatattctgagtatagtatattaactggcattgtaatttggatgatacaaagattgaaagatcataggaaagcattgcccttcatcacagaagtattcaactctgacaaataaatatgtcatcctgaattaataatgccttaataaaagtacatcctcctgctaactatcacttcagttggtttggtagagactccaaacccttgcacatatccaaaaggtgcatcccgccaatgatccccagattcggggtctgagtttggatagtccggccagcgcacagatcataacccgcacattcatctccttacttatcaccccttcttccattca

SEQ ID NO: 57379 - DNA, 3146 bp, Homo Sapiens; identical to SEQ ID NO: 23158

SEQ ID NO: 57380 - DNA, 2531 bp, Homo Sapiens
gctcgctggtggcggacccggaggctgctgcggcgccggggctccgtggcctggattgaatccgatcgggagccatgagcgtggacaaagctgagctatgcgggtctctgctcacctggttacagacgttccacgttccgtctccctgtgccagccctcaggacctgagcagcggccttgccgtagcctatgtgctgaaccagatagacccctcctggttcaacgaggcatggctccagggcatctcggaagatccaggtcccaactggaagctgaaggtcagcaatctgaagatggtcttacggagcctagtagagtactcccaggatgtcctggcgcatcctgtgtcagaagagcatctcccagatgtgagcctcattggagagttctcagacccggcagagctcggcaagctgcttcagctggtgctgggctgtgccatcagttgcgagaaaaagcaggaccacatccagagaatcatgacgctggaagaatcggttcagcatgtggtgatggaagccatccaagagctcatgaccaaagacactcctgactccctgtcaccagagacgtatggcaactttgacagccagtcccgcaggtactatttcctaagtgaggaggctgaggagggggacgaattacagcagcgctgtctggatctggagcggcagctgatgctcctgtcagaggagaagcagagcctggcgcaagagaatgcagggctgcgggagcggatgggccggcctgaaggcgagggtaccccaggtctcactgccaagaagctgctgctgctgcaatcccagctggagcagttgcaggaggagaacttcaggctggagagtggcagggaggatgagcgcctgcgctgtgccgagctggagagggaggttgcggagctgcagcaccggaaccaggcgctgactagcctggcccaggaggcacaggccctgaaggatgagatggatgaactacggcagtcttcggagcgtgctgggcagctggaggccacgctgaccagttgccggcgccgcttgggcgagctgagggagctgcggcggcaggtgcggcagctggaggaacgcaacgccggccacgccgagcgcacgcgacaactggaggatgagctacgccgagcgggctccctgcgcgcccagctggaggcgcagcggcggcaggtgcaggaactgcagggccagctgcaggaggaggccatgaaggccgagaaatggctatttgaatgccgcaacctggaggaaaagtatgagtcggtgacaaaggagaaggagcggctgttggcggagcgggactccttgcgggaggccaatgaggagctgcgctgcgcccagctgcagccgcgggggttgacccaggccgatccctcactggatcccacctccacacccgtggataacttagccgcagagatcctgcctgcggagctcagggagacgctcctgcggcttcagctggagaacaagcggctgtgcaggcaggaggcggccgaccgggagcggcaggaggagctgcagcgccacctggaggatgccaaccgcgcgcgccacgggttggagacgcagcaccggctgaaccagcagcagctatccgagctgcgggcccaggtggaggacctgcagaaagccctgcaggagcaggggggcaagactgaagatgccatttccattttgctgaaaaggaagctggaggaacatttgcagaagcttcatgaggcagatctggagttgcagaggaagcgggagtacattgaggagctggagccacccactgacagcagcacagcccggcggatcgaggagctgcagcataacttgcagaagaaggacgcggacttgcgggccatggaggagcgataccgccgctacgtggacaaggcccgcatggtcatgcagaccatggaacccaagcagcggccagctgcgggggcacctccagaactccattccctgaggacacagctccgagaacgggatgtccgcatccgacacctggagatggactttgagaaaagccgaagtcagcgggagcaggaagaaaagctgctcatcagtgcctggtataatatgggcatggccttgcagcagcgagctggggaggagcgggcgcctgcccatgcccagtcattcctggcacagcagcggctggcaaccaattctcgccgtggacccttgggacgcctggcatctctgaaccttcgccccactgacaagcactgacagacctcacaatcaagccagcctgggctccacccaccctggcttcctccagctcacatggcgcccagcactgggcttcagccaggtgctcgagagctttgaggccatgatctctgctcttccctctcccagattggtggggagggagggcgggaggtagatataggcctgttctttttagcaatgtgattcttgttgttgattctctctctggagttcatgtgctgcctcaggagactctgattttatatttgagaaaaataaaggcgttcaatctgcaaaaaaaaaaaaaaaaaa

SEQ ID NO: 57381 - DNA, 4768 bp, Homo Sapiens
atccttgccgcccgccccggcccagccgcgtcccggagccgtcgggcatggagccgtggaagcagtgcgcgcagtggctcatccattgcaaggtgctgcccaccaaccaccgggtgacctgggactcggctcaggtgttcgaccttgcgcagaccctccgcgatggagtcctgctctgccagctgcttaacaacctccgggcgcactccatcaacctgaaggagatcaacctgaggccgcagatgtcccagtttctctgtttgaagaacataaggacatttctcacggcctgttgtgagacgtttggaatgaggaaaagtgaacttttcgaggcatttgacttgtttgatgttcgtgactttggaaaggttatagaaacattatcacgactttctcgaacacctatagcattggccacaggaatcaggcccttcccaacagaagaaagcattaatgatgaagacatctacaaaggccttcctgatttaatagatgaaacccttgtggaagatgaagaagatctctatgactgtgtttatggggaagatgaaggtggagaagtctatgaggacttaatgaaggcagaggaagcacatcagcccaaatgtccagaaaatgatatacgaagttgttgtctagcagaaattaagcagacagaagaaaaatatacagaaactttggagtcaatagaaaagtatttcatggcaccactaaaaagatttctgacagcagcagaatttgattcagtattcatcaacattcctgaacttgtaaaacttcatcggaacctaatgcaagagattcatgattccattgtaaataaaaatgaccagaacttgtaccaagtttttattaactacaaggaaagattggttatttacgggcagtactgcagtggagtggagtcagccatctctagtttagactacatttctaagtcaaaagaagatgtcaaactgaaattagaggaatgttccaaaagagcaaataatgggaaatttactcttcgagacttgcttgtggttcctatgcaacgtgttttaaagtaccaccttctcctccaggaactggtcaaacataccactgatccgactgagaaggcaaatctgaaactggctcttgatgccatgaaggacttggcacaatatgtgaatgaagtgaaaagagataatgagacccttcgtgaaattaaacagtttcagctatctatagagaatttgaaccaaccagttttgctttttggacgacctcagggagatggtgaaattcgaataaccactctagacaagcataccaaacaagaaaggcatatcttcttatttgatttggcagtgatcgtatgtaagagaaaaggtgataactatgaaatgaaggaaataatagatcttcagcagtacaagatagccaataatcctacaaccgataaagaaaacaaaaagtggtcttatggcttctacctcatccatacccaaggacaaaatgggttagaattttattgcaaaacaaaagatttaaagaagaaatggctagaacagtttgaaatggctttgtctaacataagaccagactatgcagactccaatttccacgacttcaagatgcataccttcactcgagtcacatcctgcaaagtctgccagatgctcctgaggggaacattttatcaaggctatttatgttttaagtgtggagcgagagcacacaaagaatgtttgggaagagtagacaattgtggcagagttaattctggtgaacaagggacactcaaactaccagagaaacggaccaatggactgcgaagaactcctaaacaggtggatccaggtttaccaaagatgcaggtcattaggaactattctggaacaccacccccagctctgcatgaaggaccccctttacagctccaggccggggataccgttgaacttctgaaaggagatgcacacagtctgttttggcagggcagaaatttagcatctggagaggttggattttttccaagtgatgcagtcaagccttgcccatgtgtgcccaaaccagtagattattcttgccaaccctggtatgctggagcaatggaaagattgcaagcagagaccgaacttattaatagggtaaatagtacttaccttgtgaggcacaggaccaaagagtcaggagaatatgcaattagcattaagtacaataatgaagcaaagcacatcaagattttaacaagagatggcttttttcacattgcagaaaatagaaaatttaaaagtttaatggaacttgtggagtactacaagcatcattctctcaaggaagggttcagaaccttagatacaactctgcagtttccatacaaggagccagaacattcagctggacagaggggtaatagagcaggcaacagcttgttaagtccaaaagtgctgggcattgccatcgctcggtatgacttctgtgcaagagatatgagagagttgtccttgttgaaaggagatgtggtgaagatttacacaaagatgagtgcaaatggctggtggagaggagaagtaaatggcagggtgggctggtttccatccacatatgtggaagaggatgaataaattcaaatcccgtgttgcaccctgcaccaaaaatttcagagaagggataaatagaagcctgcacagcatcgtgaattaactgaagtgtttaaaaagctgcatttctggctgttcaacatcctccctccttagcccctcctaagtcttaatgctgagatttctaaagatgctggtactgacagattaatggcttgcctagagctgtgcaagaaacagcctgccagtctgtcattgtcagggaccagggcaaaaccaagagctgttcttcccagaagagccctgcaaacacattggttcgtgcttccctttacttcttctggtcagataccatgaatgccagtcatcagtaaatcttaatacacttttgctttattctcacatgccattcaccagattatttgatggtacaaagaagcagaagtgtaattttccttttcccagcatgacgaaaaattggagttctgccatttgagcagcttactggaaagatccagccttacttgtcttaaattgtccaacaaggtgactcattgcccggcaaacacttttaccctcagatgttactcatgatattataaaatatgaggccagtgctcaggtttgcatcataagtgagctatccctgaagggttttaattacttatttggtgtcctgattatatttgcaaacttctttataaaaggtgaaaaaagcacacaaaagagagggtgtcttcatattaaaccttcacaaccttcatgatttcataggattattttggaaatatagcacttgactttatgaaaggatctgggctaggtatattaggggtagttgccaataacctgaagaagctggcattgtttacagaaacagatcaagggctataatttatgtcattttatagcagcagtatctattaatacatgccttttcctcccatccacctcccccgcacacacacaaagatgacctgggacatgatttttttattcccacattttcttggagcacaaacaactttgttgaggattttggaaggaaagcacaactgggtcctttattcatttctgggacagaaagagggtcagtggacttttgtgggcctccagcttctctcagagtctccccctctgcagcccatcctgggagtgtattaactggagggaagatgggtcttgcagtacatttgttttgcccagccatcactcttttttgtgaggagcctaaatacattcttcctggggtccagagtccccattcaaggcagtcaagttaagacactaacttggccctttcctgatggaaatatttcctccatagcagaagttgtgttctgacaagactgagagagttacatgttgggaaaaaaaagaagcattaacttagtagaactgaaccaggagcattaagttctgaaattttgaatcatctctgaaatgaagcaggtgtagcctgccctctcatcaatccgtctgggtgccagaactcaaggttcagtggacacatccccctgttagagaccctcatgggctaggacttttcatctaggatagattcaagacctttacctcagaattatgtaaactgtgattgtgttttagaaaaattattatttgctaaaaccatttaagtctttgtatatgtgtaaatgatcacaaaaatgtattttataaaatgttctgtacaataaagttacacctcaaagtgtactcttggaatggattctttcctgtaaagtcttatctgcgactctgtctcgggaatgttttgtctgttgccgtcagccgaactttgttatggagggagcagcctcacacaagcagaaacactcctgtggatggtattgtagcatgtattgtttattttagtcaatagaccctctccttataaatggtgtttagtcttcctgttgcatttcatgggcctgggggtttcctagcagaggatattggagcccctttttgtgacattaccaattacatctttgtccacgtttaatactttgttttggaaaatttaaatgctgcagatttgtgtagagttctaataccaaagacagaagtaaatgttttccatatactttgtcttgcctgtatgcagcccttgtgtaatatggtgaattagagtggtatttcactttgtattattttgtaaatatgtcaatataataaatagtgactaaaaaaaaaaaaaa

SEQ ID NO: 57382 - DNA, 1767 bp, Homo Sapiens
gcgcgccgctttctgttgccgggcgcaatggcggatacgctggagtcctcgctggaggacccactgcggagctttgtgcgagttttggagaagcgggatggtacagtgctacgactacagcagtatagctccggtggcgtgggttgcgttgtgtgggacgctgccattgtcctttctaaatacctggaaacgcccgagttttctggcgacggggcccacgcgctgagccggcggtcggtgctggagctgggttcgggcaccggggccgtggggctcatggctgctaccctcggggctgatgttgtagtcaccgatcttgaggaattgcaagacttgctgaagatgaatattaatatgaacaagcatcttgtcactggttctgttcaagccaaggggggaagaaatagaaggctttccttctccacccgacttcatactgatggccgactgcatatactatgaagagtctttggagccattgctgaaaactctaaaagatatcagcggatttgaaacttgtattatatgttgttatgaacaacgaacaatggggaaaaattcagaaattgagaaaaaatattttgagctccttcagctagattttgactttgaaaaaattcctttggaaaaacgtgatgaagagtatcgaagtgaagatattcatattatatacatcagaaagaaaaaatcgaaatttccatcgtgaagcctttaatcatcttacccaaggctctaacaacctgggtaaactaaagatgtgaatagagcatgtgaatacagcatgggaagattgtgttcacagatttttttttccggcacgtccttagagatccgatgtatagatgatgaccaccaggggctgtctgcaatacgaaaaattcctgcttgcctgcctgcctgccaatggccctgaatccagcttaggttacttagttcagcatcaagttcttcttaaatgttgggaatcagttattcaaataaaaattggtattgaggcgaggctgaaatctgccaaaaacagccaacatgatttgactggaccttttacaggaagctagagataaatttctgaagagaactatctgctattatataataatgttttaaattcaaactagtaaattttagtttgtcttcagagtttaaaaggttttcattttgtacataattatacaatatttatcatttgtattttccacttcatttcttttaaaatatctttaatactgaaatgttcttttaattttaaaaagaactgagatattgtcttgtatacttatattggccaaagttttcttttcctccaccatacatgtctatgtgatttaatcagtaaattgtactgtaatgagttgctaagaagacaaatcagaagattggaggaacaaaagatatctttacagatttttcatttgagcatggagtgagaatagaaagaccagtttcaggcttatgcacttacgtggctcatgcactttatgtatatgttccaggaaaatctggcttaaaaatactggtattgtttacatgaagcagtgaaaggtttttgaataactacaaatgtagttctatatgtatataccaaatgaatttctgttctgtgtctctctgttttatgttatgaagccattcgctcatatacaataatctgtcaaggactttaatcatacttgttccaaagagtagtaaccggatggaattctggtatttacaggcattggtgctagatggtacattttatgtgttaaaataaacattgtttttgag

SEQ ID NO: 57383 - DNA, 2306 bp, Homo Sapiens
tgcggtgagggggcgagccgtgaagatggcggcagtggtggaggtggaggttggaggtggtgctgctggggaacgggagctggatgaggttgatatgtcagatctctctccagaagagcaatggagggtcgagcacgcacgcatgcatgccaagcaccgtggccatgaagctatgcatgctgaaatggtcctcatcctcatcgcaaccttggtggtggcccagctgctcctggtgcagtggaagcagaggcacccacgctcctacaatatggtgaccctctttcagatgtgggttgttcccctctatttcacagtgaagctgcactggtggaggttcctagtgatctggatcttgttctctgctgtcacagcctttgttaccttccgagccacccgaaaacctctagtacagacaaccccaaggttggtttataagtggttcctgctaatctataaaatcagctatgccactggcattgttggctacatggctgtcatgtttaccctctttggtcttaacttattattcaagatcaaaccagaagatgccatggactttggcatctcccttctcttctatggcctctactatggagttctggaacgggactttgcagaaatgtgtgcagactacatggcatctaccatagggttctacagcgagtcgggcatgcctaccaaacatctttcagacagtgtgtgtgctgtgtgtgggcagcagatctttgtggacgtcagtgaagaggggatcattgagaacacgtataggctgtcctgcaatcatgtcttccacgagttctgcatccgtggctggtgcatcgtgggaaagaagcaaacgtgtccctactgcaaagagaaggtagacctcaagaggatgttcagcaatccctgggagaggcctcacgtcatgtatgggcaactgctggactggcttcgatacttggtagcctggcagcctgtcatcattggtgtagtccaaggcatcaactacatcctgggcctggaatagtgatgaagagcatcagtggaaaacccaccccacacgccatggacctcagggcactctcctccctgcccacaaagacctcctgggtgggaaagactcaaaggggtgcttgggccactcaggacccctctggctgtgtcggactggggagggatatgatggagagccagccagtggggctgtcagcagtggggggctttttaaaagaaaactattttgatgaatatatttaaaaaacctttttttattgtggagcataggaattgcccccctccaggcttcaccctccctgcctaagcagggtgggggcagagccatgacatttttggtttaaaggagccttctcatctctggccgagaacactgctgggctcccaggtagctgaaggcctcagcccacccactcccttcttccctgtgtggggctcaagcctggtgcacttagtatagaagagctaacgtactcaggcttgtgccacgggtgagcactgaggccccaggtgtcctccctcccccactgtctgggacacaggacaggtgttgcgtctgactctgtctccccctgtccaagagctataggctggttgaggcaagtggaaccttatcagtgacttggccaacaagggaagccttggggcctcagaattcattgaagatttgttttgggacaactggaagaatcagcaccatggatactcgcccgtgggcagggctgtggtcagccaagaatagaggtcatatagttgggccatggggcaattgttggcagccatgactgacggccccttgtgcaagctcattcttcagtggatccttcagtggagtggtgacacgtgccagcggtcactctgccacatcacttccttcttgaaagcctaagagtgcgtatgcgtgtgtgtgtgtgtgtgtgtgtacgtgaggcagaagaatatgacagatgtcagcttctccctgtgtcagatgatatgtccttgaagctggcaggggattcccagtccagggaatatccctacatgatttttgtcattcatgggtcctccctgggcctgacaacgggagtggtgggtgggtgagaacaggttctgagagggggcttctaggaaggccccagccctagtcctaggcgacttgaataaagtgggaggtcaaacatgggccttcggcattgggtttctagggaatatggctcagtagggcctgccccttcaagggcagcaagaacgaagcaggatgttgtcactcccgtctgaataaagctccatgagctgggttggaaagctgaaaaaaaaaaaaaaaaaaa

SEQ ID NO: 57384 - DNA, 1515 bp, Homo Sapiens
actagcggagccgcgagggagaggccgcggccccttcccgttgcctgcggccaccggccggcattcagagcccctcgcctggcgctaaatttaaaaacgtaacacgagcagcaggctggtctcggaaacgaaacgaaattcggtccctgggcctcctcccgggcgctgccggtccctcagcgcgccgcgccacccggaacagacccttctcccgccattttcggcggggctgggagactgaggcccgcggcgctgagcctgcggcgccccggaagaggcgggcggcatggccgctggcgtggactgcggggacggggttggcgcccggcagcacgtgttcctggtttcagaatatttaaaagatgcttcaaagaagatgaaaaatgggctaatgtttgtaaaactggttaacccctgttcaggagaaggagccatttacttgttcaatatgtgtctacagcagctgcttgaagtaaaagttttcaaggaaaaacaccattcttggtttataaatcaatcagttcaatcaggaggtcttctccattttgccacacctgtggatcctctatttctgcttctccactacctcataaaggctgataaggaggggaagtttcagccccttgatcaagttgtggtggataacgtgtttccaaattgcatcttgttgctgaaacttcctggacttgagaagttacttcatcatgtgacagaggaaaaaggtaatccagaaatagacaacaagaaatattacaagtacagcaaagagaagacattaaagtggctggaaaaaaaggttaatcaaactgtggcagcattaaaaaccaataatgtgaatgtcagttcccgggtacagtcaactgcatttttctctggtgaccaagcttccactgacaaggaagaggattatattcgttatgcccatggtctgatatctgactacatccctaaagaattaagtgatgacttatctaaatacttaaagcttccagaaccttcagcctcattgccaaatcctccatcaaagaaaataaagttatcagatgagcctgtagaagcaaaagaagattacactaagtttaatactaaagatttgaagactgaaaagaaaaatagcaaaatgactgcagctcagaaggctttggctaaagttgacaagagtggaatgaaaagtattgataccttttttggggtaaaaaataaaaaaaaaattggaaaggtttgaaactttgaaaataaaatctagcaaaaatatttgctttttacatgtttcagtttgtccttcctgactgttaatgactacctttggttgggggaaggaagaggccaatttcatgttctcttaaacatttctttgcatttggtttttgtgttcctgaacaaaatatgggaaagtgtctaacttcatggctatggccttttggagtctcatctgacataatgaaaagtaatcacttgaagagaattaacatatagcatcatgattttctcaataaactgatgtgtgacaatgtt

SEQ ID NO: 57385 - DNA, 3075 bp, Homo Sapiens
acagaaggcgatgggccgagagctgaggaactacaactcctagagtactccgcgccgccgggacgccgcgcggctgcggggctgggcgagcgcaaagatgtccgcgcccgctgccgggaggcgaggccaactcgggatatcccggagcctctggggaggcggtcactccgacgtctgaggacctgggccttggacccggactcgttatgaagagcgattcttcgacctctgcagcccccctcagggggctcgggggacccctgcgcagcagcgagccggtgcgcgcggtcccggcccgggcgccggccgtggaccttctggaggaggcggccgacctcctggtggtgcacctggacttccgggcggcgctggagacctgcgagcgggcctggcagagtctggccaaccacgccgtggcagaggaacccgcgggcacctcattggaggtgaagtgctccctgtgtgttgtggggatccaggccctggcagaaatggatcggtggcaagaagtcctctcctgggtccttcagtattaccaggtccctgaaaagctaccccccaaagtcctggagctgtgcattcttttatacagcaaaatgcaagagcctggagctgtgctggatgtggtgggtgcctggctccaagacccagccaatcaaaaccttccagaatatggagccttggcagaatttcacgtgcagcgggtgctgctgcctctgggctgcttatcggaggctgaggagctagtggtgggctctgcagcctttggtgaggagcggcgactggatgtacttcaggccattcacacagcgaggcagcagcagaaacaggaacactcaggctctgaggaggcccagaagccaaacctggaaggctctgtctcccacaagttcctgtcactaccgatgttggttcgccagctttgggactctgcggtgagccacttcttttctctgcccttcaaaaagagtctcctggctgccttgatcctctgtctcctggtggtgagatttgatccagcttccccttcctccctgcacttcctctacaagctggcccagctcttccgctggatccggaaggctgcattttctcgcctctaccagctccgcatccgtgactgagggtccctgcgcaccacagcctctctgctcctcacgtccgtggccacagaagcagagcgacagagcgacacatccacaggcgcccctggggaaatgggaccagcctaatctcgcggagtgcactgtgtcttgctgcctgggtgccctctcctttgcaccctacttcggctggtcgcggtagatgatgtggaaacaaagcaggaccagcaggcacagcacctccagaacagtgccccggatgaccagaggccccttgaaaaggaggggtttggggacagggactgtgtccatgaaacattccatcttcttggtgaaggcaaggggttggttcttcaggtcaggatgttaatggagctggaagttcagaaaaagcctggtgaagtgacccttggcctttcacttcttgagaaacatacttctttgctgggcatggtgactcacgcctgtaatcccagcactttggaaggccatcgcgcccggccaacttttctttagaaaaatgagtaaagtaggtaaacttcacaggccccttagaattaaatccttagggcatggttcaagtctgtaggaagcaaatctatacttttttatatgggcttttaagtaaagcttagaaccctggggggagaaaagcagtcaggtgaggtttgagattccttctatagaatgatttcttaaaatgaaaatctgggcccacttaactaccctagataaaacgcttcaatggcttcccatggctcactggataacatctaaattcttcatggaattgaaggcccctatgtgctggttttggctaagatctcccctttgatgtgggtcccctgttgattatacgtgcggccttccagctgcccaccatcacagctacagctcgctccccttggcctctgtgccttggctcgcactgttcctactgaaggcctagcacctgctcttggcctggtgagcccctccaccttccaggcttactcaaagaattctttctgcccctccctgtgtcccgggacctgtttcatatcgcttctgtggtcgtgaccccatggtcttgtaattgtgaacttctttgctgccccttcgaagctggggagtgcttgttgcagatgcatccaagaggggtaattgcgtatcaacagtggatttgctggttgtttctacagggttctgaagcatgcaacatagaacagatacctttaaatttaggggcgctaaggaaagcaggaaccagtaatcctcttctgtggtgggatgggagggtgggggagaggggtggaatggagaggaaacaggctattgttggccagccctgggtggaggtgggtgcaagcaggacagatagtgcctgggggtgggggcggagggttcgcctctaggaaggggctagaagggatgaggaaatagttcatagcttcgtgcaggtgatccctattctgcgtgtatgtgtttgcacatgagtgtttgtagaccatagaccattaaaaaatacggaattcaaaagttacaaaaagggtattcttggaaaagaaagttgtttttttttagtcttgctgtgttgcccaggctggacctgaactcctgggcttgagcaagtcttcccctcagcctctggagtagctgggcctacagtgtgtgctgccacacccagctaatacagtctttctactcccgctctctattccccagtttcttgcccagaggcaacccttgccagtctgtttatccctccagatacagtctctgatagtaaacttttctttctcttacacaaatgatagtagtcacatacactacacacactgtgccacgtttaaaaagaaaaaaaacaattctcggctgggcgcggtggcgcatgcctgtaatcccagcactttgggaggccaaggtgggtgaatcacctgaagtcaggagttcgagatcagcatggccaacatggtgaagccccatctctact

SEQ ID NO: 57386 - DNA, 1781 bp, Homo Sapiens
gcttccccgagcgccgtcggtggtcatggctgccccagcctcccggcaggtccgacgcagagcccgggcagcgccgcggccccgctcggccgaggattggtggtgggaccggctggcgccgaggggctcggggtaccacctgctgcagtccgacagcatgctgctggtgctgtccgaaccaggccccgcccggccccgcgcacagcggcgcgattcccgccgcactccccggcagccgccccggggccccagcgccgcggccaagcccaaggccgggctcaggtccgaggcggcggccgcgcccgcacccgcaccggcacccacgcccacgcccgaggaagggcccgacgcgggctggggagaccgcattcccttggaaatcctggtgcagattttcgggttgttggtggcggcggacggccccatgcccttcctgggcagggctgcgcgcgtgtgccgccgctggcaggaggccgcttcccaacccgcgctctggcacaccgtgaccctgtcgtccccgctggtcggccggcctgccaagggcggggtcaaggcggagaagaagctccttgcttccctggagtggcttatgcccaatcggttttcacagctccagaggctgaccctcatccactggaagtctcagctggtaggtgagtgctgtcctcggctcactttcctcaagctctccggctgccacggtgtgactgctgacgctctggtcatgctagccaaagcctgctgccagctccatagcctggacctacagcactccatggtggagtccacagctgtggtgagcttcttggaggaggcagggtcccgaatgcgcaagttgtggctgacctacagctcccagacgacagccatcctgggcgcactgctgggcagctgctgcccccagctccaggtcctggaggtgagcaccggcatcaaccgtaatagcattccccttcagctgcctgtcgaggctctgcagaaaggctgccctcagctccaggtgctgcggctgttgaacctgatgtggctgcccaagcctccgggacgaggggtggctcccggaccaggcttccctagcctagaggagctctgcctggcgagctcaacctgcaactttgtgagcaacgaggtcctgggccgcctactccacggctctcccaacctgcgcttactggatcttcgtggctgtgcgcgcatcacgccggctggccttcaggatctgccatgtcgggagctggagcagcttcatctgggcctgtatggcacgtcagaccggctgactctagccaaggagggcagcccctttttgacccagaagtggtgccatacactgcgagaactggacttgagtggccaggggttcagtgagaaggacctggagcaggccctggctgccttcttaagcacccctgggggctcacacccagccctgtgctctcttaacctcaggggcacccgggtcacaccaagcactgtcagctctgtgatcagcagctgcccgggcctgctttacctcaacctggagtcctgccggtgccttccccggggtttgaagcgggcctaccggggcctggaggaagtccagtggtgtctggagcaggtgctcaccagcccctcacccagctaggcagccacagacctgggacacctcagccagcttgcccaccctccacctttgcccaatttcagatatttgagcattttgttaaaataaaacatttttaggaaaaaaaaaaaaaaaaaaaaaaaaaaaaaaaaaaaaaaaaaaaaaaaaaaaaaaa

SEQ ID NO: 57387 - DNA, 1983 bp, Homo Sapiens
gtttctcaacatcctggcttagtattgtgtgcaaaatcagagaggggtgcaagatcctgatttttcaggagttcaagcgacaatggcagcccaatacggcagtatgagcttcaaccccagcacaccaggggccagttatgggcctggaaggcaagagcccagaaattcccaattgagaattgtgttagtgggtaaaaccggagcaggaaaaagtgcaacaggaaacagcatccttggccggaaagtgtttcattctggcactgcagcaaaatccattaccaagaagtgtgagaaacgcagcagctcatggaaggaaacagaacttgtcgtagttgacacaccaggcattttcgacacagaggtgcccaatgctgaaacgtccaaggagattattcgctgcattcttctgacctccccagggcctcatgctctgcttctggtggttccactgggccgttacactgaggaagagcacaaagccacagagaagatcctgaaaatgtttggagagagggctagaagtttcatgattctcatattcacccggaaagatgacttaggtgacaccaatttgcatgactacttaagggaagctccagaagacattcaagacttgatggacattttcggtgaccgctactgtgcgttaaacaacaaggcaacaggcgctgagcaggaggcccagagggcacagttgctgggcctgatccagcgcgtggtgagggagaacaaggaaggctgctacactaataggatgtaccaaagggcggaggaggagatccagaagcaaacacaagcaatgcaagaactccacagagtggagctggagagagagaaagcgcggataagagaggagtatgaagagaaaatcagaaagctggaagataaagtggagcaggaaaagagaaagaagcaaatggagaagaaactagcagaacaggaggctcactatgctgtaaggcagcaaagggcaagaacggaagtggagagtaaggatgggatacttgaattaatcatgacagcgttacagattgcttcctttattttgttacgtctgttcgcggaagattaaacttaatgaaaatctgtttgtattttctgcatattctctggcaaccttgccccatacttacttatttagcatagtcgagtgctctagtttctgtctctcaggcactcgtaactaaggaccaccattggccattggtagatgtttgattgacttaacaagagagggacaaattttcaatttgtgaaactccaaagcagaaagtattggtgcttgctaccttgtgaattcttccttagacatgcagagaaaatgtatgcaagagaccaaaaagatggctccaagctatgtcatgttacctgtaataaaatcttttcttctagattctttctatgttggcagataatctccccttgtagcttccactcacttattcttgcattcagagtcacaatgatcatcttacccatgtggtttttgagaaagaaagatcaattctttgtttgcagtaggtaatcttagagatggagatgattgtagaattattcctagatgagtgtcaatttatttaattccattgtcatataaggagtcaaattgtttcttatcatttgttcattgaagaacagagacctgtctggaaaatcgatctctacaaattcaattaaataatgatccccaaatgctgaaaaagtgaaatacagcaattcaacagataatagagcaatgtttagtatattcagctgtatctgtagaaactctttgacgaacctcaatttaaccaatttgatgaatacccagttctcttcttttctagagaaagatagttgcaacctcacctccctcactcaacactttgaatacttattgtttggcaggtcatccacacacttctgcccccactgcattgaattttttgcttatgttgtttataataaaacttttcaattatctcaaaaaaaaaaaaaaaaaaa

SEQ ID NO: 57388 - DNA, 2061 bp, Homo Sapiens
attttccggcaccggcatggccgggtgagctgcaggctaccttatttaagaccgggaatttagtcagcctggtgagccgactctgaggagatggagtatcgctgaggtgatgagagagaatgtggttgttagcaacatggagagagaaagtgggaagcccgtggctgttgtcgcagttgtgactgagccttggtttacccagcgatacagagaatatctccagaggcagaaactctttgatacacagcaccgtgtggaaaagatgccggatggctcggtggcgctaccggtgctgggagagacgcttccagagcagcacctgcaggagctgaggaatcgtgttgccccaggcagtccctgtatgctcacgcagctcccggatcctgttccttcgaagagggcccagggttgttcacctgcccaaaaattgtgtcttgaggtgagtcgctgggtggagggtcggggagtcaagtggtcagccgagttggaggctgatttgccccgatcatggcaacggcatggtaatctcttgttgctgagtgaagactgtttccaagccaagcagtggaaaaatctgggaccggaactctgggagaccgttgccttggcacttggcgtccagcgtttggcaaaacgagggcgggtatcaccggatggtactcgaactccagcagtgacactgctgctgggtgaccatggctgggtagagcatgtggataatggtatccgttataagtttgacgtgacccagtgtatgttctcctttggaaacatcactgagaagcttcgagtggcatcgttgtcctgtgctggagaagtgctggtggatctctatgcagggattggttattttacattgcctttcctagttcatgctggtgctgccttcgtccatgcttgtgagtggaatccccatgctgtagttgctctgagaaataaccttgagatcaatggagtagcagatcggtgccaaatacactttggagataacagaaaactgaagctctcaaatattgcagatagggtgatcctggggctgattcccagctctgaagaaggctggcccattgcctgccaagtgttaaggcaggatgctggaggcattttgcatatccaccaaaatgtggaatcttccccagggaagaatcttcaggctcttggagtcagcaaagtagagaaagagcattggctgtatcctcagcaaattaccaccaaccaatggaaaaatggagctaccagggattctaggggaaaaatgctgtcaccagccaccaagccagagtggcaaaggtgggcagaatctgcagaaactcgaatcgccactcttcttcagcaggtgcatgggaaaccatggaagacacaaattctgcacatccaaccagtgaaatcctatgctccccatgtggatcacatagtcctggatctggaatgctgcccctgtccttcagttggctagaggaggtagatcctgggacacatgggatccacgtgcgagtggcccttaaatgtatcagttcagtccaggttgtcatcccttttgtcccctggtgatcagtttttttcatattttatagccctgaaagcaggctctagatcgattcaaattatttcatttgtcttccattgataacagaaaatgaaatacctgtttgggagaagcagcatggcccattgaaatgaggctcatctgtgcaattatgaattccaaattctgacctcagttctggaattgaagtttcagtatgttttggcctcgggtttcgttatttgcaaaatgagagtttctttgaactgtctcacgtgactattaagcaactatacacaggacatcggttattttagagtgaaagacacagtgctttttccaaattgctctggctaccatatagaaaattgactgaaggagggccaagatggaaacagagagaccagtgaggaggcttctgtggttgtccaggtctgaggtgatggtaacttggactcggatggtggtaatgggaggtagattgatatgataaataaaattgacagcccaaaaaaaaaaaaaaaaaaaaaaaaaaa

SEQ ID NO: 57389 - DNA, 1836 bp, Homo Sapiens
ggggaacctccctgaagagtgccctggtcacagcacccttgaagacagccattggccatggggacccaaccagagcctggcctgggagccaggatggccatccacaaagccttggtgatgtgcctgggactgcctctcttcctgttcccaggggcctgggcccagggccatgtcccacccggctgcagccaaggcctcaaccccctgtactacaacctgtgtgaccgctctggggcgtggggcatcgtcctggaggccgtggctggggcgggcattgtcaccacgtttgtgctcaccatcatcctggtggccagcctcccctttgtgcaggacaccaagaaacggagcctgctggggacccaggtattcttccttctggggaccctgggcctcttctgcctcgtgtttgcctgtgtggtgaagcccgacttctccacctgtgcctctcggcgcttcctctttggggttctgttcgccatctgcttctcttgtctggcggctcacgtctttgccctcaacttcctggcccggaagaaccacgggccccggggctgggtgatcttcactgtggctctgctgctgaccctggtagaggtcatcatcaatacagagtggctgatcatcaccctggttcggggcagtggcgagggcggccctcagggcaacagcagcgcaggctgggccgtggcctccccctgtgccatcgccaacatggactttgtcatggcactcatctacgtcatgctgctgctgctgggtgccttcctgggggcctggcccgccctgtgtggccgctacaagcgctggcgtaagcatggggtctttgtgctcctcaccacagccacctccgttgccatatgggtggtgtggatcgtcatgtatacttacggcaacaagcagcacaacagtcccacctgggatgaccccacgctggccatcgccctcgccgccaatgcctgggccttcgtcctcttctacgtcatccccgaggtctcccaggtgaccaagtccagcccagagcaaagctaccagggggacatgtaccccacccggggcgtgggctatgagaccatcctgaaagagcagaagggtcagagcatgttcgtggagaacaaggccttttccatggatgagccggttgcagctaagaggccggtgtcaccatacagcgggtacaatgggcagctgctgaccagtgtgtaccagcccactgagatggccctgatgcacaaagttccgtccgaaggagcttacgacatcatcctcccacgggccaccgccaacagccaggtgatgggcagtgccaactcgaccctgcgggctgaagacatgtactcggcccagagccaccaggcggccacaccgccgaaagacggcaagaactctcaggtctttagaaacccctacgtgtgggactgagtcagcggtggcgaggagaggcgggcggatttggggagggccctgaggacctggccccgggcaagggactctccaggctcctcctccccctggcaggcccagcaacatgtgccccagatctggaagggcctccctctctgccagtgtttgggtgggtgtcatgggtgtccccacccactcctcagtgtttgtggagtcgaggagccaaccccagcctcctgccaggatcacctcggcggtcacactccagccaaatagtgttctcggggtggtggctgggcagcgcctatgtttctctggagattcctgcaacctcaagagacttcccaggcgctcaggcctggatcttgctcctctgtgaggaacaagggtgcctaataaatacatttctgctttattaaaaaaaaaaaaaaaaaa

SEQ ID NO: 57390 - DNA, 3004 bp, Homo Sapiens
ctggaaacccatgtgcatttcagttcaggaaagaatggtaggcttggtggggggagctcccgcaaaaggggaactaatacagaaacactctggtatttgtctgcctctcttgttccagcgccgttttccctatatccggaattcgtccctgcgcattccaatacctgaagcggccacagggtacaggacagggagccctccgacagaaaagagtcgcggcgctaaacaaagcctgatatcactccgcttccataagccggatccccataaactacgctctagctcctcccactgccgttgtgggtaacgcggacgtggaagaacctcgtctgcggaggaaaaggtagatgttaaatggtaactacgcgcgaggttctgaggagccctgggaacaggaaggagaaaagaataccaaaagtgacaacagtttgccaatcgcagtctttaatctgataaagcggttatctcgtcttgagtcccaggtgccgagtcaatccccatacacagccgccgccattgcctcgagtccttgtgtctgactgtctgttcctgctgctgtatgacacagcacctcgaggcaaggaaataagaaaactgcctctgatccaagcagagaaggtctgcctgtagatctgctgtagggcttgtcaccattggaagcaaggtcctacttcagtggcagatctggtggccttggagtggctgaagaccaccaccctccacagggctgggcccatgcacagccatccttccctaccttgagtgagcttcctctgcatgttttctatatcactggcagagcctgtagttggaaaggggacagagtgactactggactttgtgtgaaaacaccaaccgggacaaaacttcagtcaaggctgagacgggtgggggtatataacttgtccttacgttaaacttggaacatggttgactctgggacagaagcaagggctagaggaaaggctgaggctggcctgcaagatggaatcagtggtcctgccactgctagagtgaatggtaaaacccaggccgaggcagtggctgaggcagaactgaaaacagaatcagtgacccaggccaaagctggtgatggagcaatgaccaggacacatacagtgacctacagggaggctatggctgtgacaagggaagtgatcaaggtggaagatacaactaagactagagtcatggttgagactaagacaaaacccctggcagaacgcagtatagtgccacaaaccaagtcaaaggccatgcctatgtctagggtcagtactgtaaccaagtctgaagtcaaggttgttgctgtcattgaggcaaatattaggtcctatgccaagtcacatgataaggccaatactgggtccagacctgacagaagggaagagaccagcattgggatgaaatccagtgatgaggatgaagaaaatatatgctcctggttctggactggagaagagcctagtgtagggtcctggttctggcctgaagaagagacctctcttcaagtttataagcccctacctaagatccaggaaaagcccaagcccacacacaaacccacacttactataaaacaaaaggtaatagcatggtcaagggccaggtatattgtcctagttccagttgaaggaggggagcaatccttgcctccagaaggaaactggaccctggttgagaccttgattgaaactcctctggggattcgacctttgaccaagatcccaccttatcatgggccttattaccagaccttagctgagatcaaaaaacagattaggcaaagggaaaagtatgggcctaatccgaaggcctgccactgcaaatcacgtggctttagtttagagcctaaagagtttgataaacttgttgccctccttaagttaactaaggatcctttcattcatgaaatagctacaatgataatgggcatcagtcctgcttatccatttactcaagatataattcatgatgtaggtattactgttatgattgaaaacttggtcaataatcccaatgttaaagaacaccctggagctttaagtatggtggatgacagctctgagtcttccgaagaaccaaaatcaggggagtcatatatacatcaagtttgtaaaggcataatctcttgccccttgaactcccctgtgcagctggctggactgaaattactagggcacttgagtataaaatttgaagatcactatgtgattaccagttatattccagatttcctcaccttgttaaacaagggaagtgtcaaaaccaagttttatgttttaaaagtgttttcgtgtttgtctaaaaatcacgccaatacaagagaattgatcagtgccaaagtactgtcatcattggttgcaccctttaacaagaatgagtcaaaggccaatattcttaatattattgaaatatttgagaatataaattttcagttcaaaacaaaggcaaagctatttaccaaggaaaagttcactaaatctgagcttatttcaatattccaggaagcaaaacagtttggtcagaaactccaagacttagcagagcacagtgatcccgaagtgagagataaagtcatacgattaatactaaaactctgaatacccctctgttctcataaagcctcaaacagttttttggagttgcaatatgaaaccaatgcatattgtaattataaattcaatacttatgttttccatgttgattgagggaggcaattttatggataccaattaatcttgagatcctgaacatgtgctgatttttattgtgctatatagtatataaattgagatatttttggtatttctgcaacgtgacctgataatgaatctattcatcctgagtaagctatacttctgtgctttatattgatatgtgtattcttttgagattttatttacatgttgttaataaagttgcatgctaaaactggtgaaaaaaaaaaaaaaaaaaaaaaaaaaaaaaaaaaaaaaaaaaaaaaaaaaaaaaaaaaaaaaaa

SEQ ID NO: 57391 - DNA, 3861 bp, Homo Sapiens
ccacgcgtccgggacggggcaaactagcttttgggagtgaagcgggtacgcagttatccaacaatgtctggtgagtcaggacagcctgaggctggtccctcacatgcagggctagattggccgaaccctgagaggaatcgggctggggtcccgggaggggtgatccgaagagctggttcccaagggcccaggtcctggatccaaaaggttcttgagcagattatggactcacctcgccagtgtgtcaccccctcggaggtggtgcctgtaactgtgctggccgtccagaggtacctgttagaggatgagccacgcgacacggtgcccaagcctcccctttattgctatgatgtgacgatctcagatggggtgtaccaggagaagtgctacctggaccccagcttgaactctctcgtatatcaaaatattcttaaagttggcattcaaatgagaatttccagggtctcatgtctttacaatgagaaaaggataggccaggggatcctgtgcatagataacgtccactgtggggagacttcagacagtatttctttagaaactcccttcagaaatagagcgcaccaggagaaaccagagaggcctttaagaggcgggaagagtcattacctggcgctgtggaataacgaagatccctatggagatatctggttaacagacaagcaacctgaggaacacaactttagcgataccaaaataatttccctttctcatcttgaaatgacctggactaacagaagaaattttcctgcattgcttgtgaggatcttacataaatcaaaactgcgatactatggaaaacctgataaaaagatgattgaaccatatcagacctttttggaagttgctgacagttcaggcacagtgtcagtgattatgtggaatgccctgtgtcctgagtggtataaaagtttgcgggttggtttagttcttctgcttcaagactattctgttaaaaagagttatccattcagaatacagcctgtccccgtggatccacagatcaaactaatttctacaatggaaatctgcctgaatcttcgagatcccccaacaaatataattatcattccagaaaagcaggtgaaaccagaatggagactgccaaagctaaatcaccgatttaccacaaggtcagaactggatgatatgccagaaaattgcatctgtgatgttattggccttttagtttttgtaggaagggtccagcggtcaaaaaagaaagaaaaccgtgaagatttttggtcatatcgctggattcacattgctgacggtacttcagaacaaccatttatagtggaactgttttcaacatcgcagccagaaatctttgaaaatatttacccaatggcatattttgtgtgtacacagttgaaagttgtcagaaatgacaatcaagtacctaagctgctttacctcaccactacaaatgagagtggagtgtttattactggtcatagaggccagccgtatacgtatgatgccaaggtaaaaaactttattcaatggattagaacaaagtctgattccggggaacagaagaatatggttattggtggatattacccctatccaccagtgccagagacattttccaagtatagtagttctattaaagttgagtcgctcttgacagctataagtgaagtcaggaaggagattgaagacttgcagtatagggaacaaaagcgcattgcaattcaggggataattactgctataaagtatatcccccatagcagtgcgactgaaagtgcctcagcatcagaaacacttcggaatgctaacagaccctcgacctctcaagcagctagagtagaaatgcaagaaagaaatggtaaacggcatcaagatgatgagcctgtgaattctcagtatttccaaactacatctacaaatttaagtctgagcaataaaataagaattcttcaaggcccacacgctaatccagttgctgtacctcaaccaggagcttctgtacaaacaaagggaattaaaccgggcatgccaagcatcttcaaccgtcgagcaaatataaatgctaatctgcaagggaaagccagaaaaactataagtgataggtgggagagtcagctgtggagagagaaaaagtttggcttaatagatcacctacactacagccgtgtttatcctgaaagtattccacggaaatttatgtttgaacacagaaagtttcttagtgaccagtataattctcagcctgcgaaatatgtaccaccagaaggaaggcccccaaaacttgatgattttaagagcgcccgaagccttggacattttgaagtaaccatactaggtctgaaccatgagatagcaatcgatgttgctttcctacccatgtattgtccagaagatattcgaacatctcaaatagacacactgttgacctccatgaattacagctgtgcatatccacaggacacaactggaaatgaccgattgccaggtccaagagcggttgcaggtgatattataaaagcagcaactgaactggatagagtgcatatcgtcggtatcttggatatctgtaatttgggtaataataaagtggaagtctatttgcacaagatttatagtccagagaatacttcttaaaagttagcaaatgaaattattacagattatacgagtgtactgctttaaagatattccatcattttgctggtaatttcagtaactgttttcagcaagaatattacatgagctctaaagttattaagcagttttatgttcgttttgtgtttagggagctttttaaaacacttcatttcagattcattattgaaaaaggtcatcaaaataatttttgtgtataagggaatttaccttgcttaccttactagtatgactattatcttgacttctggtaatttatgttcactattccatttgtgaagtgtactttcattctaaagcctcagtataaggcatcctaacttacaagagtaactttccatggacatttaacatccttccaattttattcacatataatgggaaattttgaattgccagtttgaagactgttctcctaaagtgttcaacctgcacttcttacaaccaaggtagtttgtatcattttcaaaagtacacattattagggtctagttgcccctggtccttagcttgctcagctgcaaaataagcgtgctaaattaaattgtcttaaggtttttccacttcattttgtgactttgtgtggttcgaatttctcagtattttaaccagtgtgttgatgttaaagtcaaaggccgcagtatgtctatattcttgctgtactcattggtagtttcagtatatgtaatgtgagtttaaatagtgaaattgtatctcatattaacatttcaaatgctcatattgaaaatggaaaatagtaaacacaggaattgattttattctggttgtctataatacttcattttaaatgtaaatggccactctgcatttgcaaggcccggtggttgacatctgtgtggtttgttagatgagacaaaatgaccattaaatgagtttatagattattctgtatcaagataaatctgattccagttaagctataaacttgtgggattttcttgtagccctatagttctgtgacttcatttgctatacgctttaaatgtgttgagcagcctatgaacctaaagacatactgcagtttgttcataaatgtattcagtcttttattctttataattgtgtgtaaatgttaactaaacagtggattcctctcgtgttacagttttgagtgaattattaaagaagttaaaatgcaataaaaaaaaaaaaaaaaaaaaaaaaaaaaaaaaaaaaaaaaaaaaaaaa

SEQ ID NO: 57392 - DNA, 1897 bp, Homo Sapiens
cccggggggagccggcggccggcgcgggcgcggcgggccgggcaggggcgaggggcgccgggtcttgccccagaagctgcgggcacatccacgcctgaaatgcggcgctcagtcctggtcaggaacccaggccacaaaggcctgagacccgtttatgaagagctcgactctgactccgaggacctagaccccaatcctgaagatctggacccggtttctgaagacccagagcctgatcctgaagacctcaacactgtcccggaagacgtggaccccagctatgaagatctggagcccgtctcggaggatctggaccccgacgccgaagctccgggctcggaaccccaagatcccgaccccatgtcttcgagtttcgacctcgatccagatgtgattggccccgtacccctgattctcgatcctaacagcgacaccctcagccccggcgatccaaaagtggaccccatctcctctggcctcactgccaccccccaggtcttggccaccagccccgcggtgctccccgcccccgccagcccgccccggcccttctcctgcccggattgcgggcgagccttccgccgcagctccgggctgagccagcatcgccgcacgcacagcggcgagaagccgtaccgctgccccgactgcgggaagtccttcagccacggtgccaccctggctcagcaccgtggcatccacactggggcgcggccgtaccagtgcgcggcctgcggcaaggccttcggctggcgctccacgctgctgaaacatcgcagcagccacagcggggagaagccgcaccactgcccggtgtgtggcaaggccttcgggcacggctcgctcctggcacagcacctgcgcacgcacggcggcccgcggccccacaagtgcccggtgtgcgccaagggcttcggccagggctctgcgctgctcaaacacctgcgcacgcacacgggcgagcggccctacccgtgtccgcagtgcggcaaggccttcgggcagagctcggcgctgctgcagcaccagcgcacacacacggccgagcgcccctaccgctgcccccactgcggcaaagccttcgggcagagctccaacttgcaacaccacctgcgcatccacacgggcgagcggccctacgcctgcccgcactgctccaaggccttcggccagagctcagcgctgctccagcacctgcacgtgcattcgggcgagcgtccctatcgctgtcagctctgcgggaaggccttcggccaggcctccagcctcaccaagcacaaacgggtgcatgagggtgcagccgctgctgcagctgccgcggccgctgcagctgcagcagcggccgccggcctgggcctcgggcctggcctaagccctgcatccatgatgaggccggggcaggtctccctcctgggtcctgatgctgtttctgtgctcggctctggcttgggcctcagccctggcaccagctctggccgcaaccctgaccctggctctgggccgggcactctgccggatcccagctccaaacccctccccggctccagatccacccccagccctactcctgtggaatcttctgacccaaaggctgggcacgacgctggtcccgaccttgtgcccagcccagaccttgatcctgtgcccagcccagaccctgatcctgtgcccagccctgatcccaaccctgtgtcctgccctgacccctgttctcccactcgtggcactgtcagcccagccctccctaccggcgagagtccagagtgggtacaggagcaaggggcactgctggggcctgatggctgaaggagacgccggcatcctcgggggcctggggaagttgtgtgttgtgcagtcagtaaaatcctcccactgcctccggaaaaaaaaaaaaaaa

SEQ ID NO: 57393 - DNA, 2255 bp, Homo Sapiens
atccctccctgcccaggccgcgagaatgaccactccacttgcaggcgaagcccctggccgctgtgctgaaggaggtgtgcgacgcgtggagcctgacgcactctgagcgttacgccctgcagtttgcggatgggcaccggagatacatcaccgagaataaccgcgcggagatcaagaatggcagcatcctgtgcctcagcacggccccagaccttgaggctgagcagctcttgggtgggctgcagagtaacagtcctgaagggcgccgggaagccctgaggcgccttgttccgctggcctcggacatgatctttgccagggaggtcatcagccgtaatgggctccagatactaggcaccatcattgaagatggggacgacctaggagaggtgctggccctcagcctgagggccttctcagagctcatggagcacggcgtggtgtcctgggagactctgagcatcccctttgtgaggaaggtggtgtgctacgtgaacatgaacctcatggatgcctccgtgcctcccctggcccttgggctgctggagagtgtgaccttgagcagcccagccctgggccagctggtcaagagcgaggtgcccctggataggctgctggtgcacctacaggtgatgaaccagcagctgcaaaccaaggccatggccctgctgacagccttgctgcagggggccagccctgtggaacgcaagcacatgcttgactatctttggcagaggaaccttcgccagttcatctataagaacatcatccacagtgcagcaccaatgggcgacgagatggctcatcacctgtacgtactgcaggctctcatgctggggctgctggagccgcgcatgcggacgcccctggacccctacagccaggagcagcgggagcagctgcaggtcctacgccaggctgccttcgaggtggagggggagtcctcgggtgccgggctaagtgctgaccgtcgccgttccctctgtgcccgagagttccgcaaactgggcttttctaacagcaacccagcacaggacctggagcgcgtgccccccggtctgctggccctggacaacatgttgtacttctccagaaacgcgcccagcgcgtacagccggtttgtgttggagaacagcagccgcgaggacaagcacgagtgcccctttgcccggggcagcatccagctgacggtgctgctgtgtgagctgctccgtgttggggagccctgctctgagacagcccaggacttctcacccatgttcttcggccaagaccagagcttccacgagctcttctgtgtgggcatccagctgttgaataagacctggaaggagatgcgggctacacaggaggacttcgacaaggtcatgcaggtggtgcgggagcagctggcccgcactctggccctgaagcccacttccctggagctcttccgaaccaaggtgaatgcgctcacttatggggaggtgctgcggctgcggcagactgaacggctgcaccaggagggcacactggctccccctatactggagctgcgggagaagctgaagccagagctcatgggcctgatccgccagcagcgcttgctccgcctctgtgaggggacgctcttccgcaagatcagcagccggcggcgccaggataagctgtggttctgctgcctgtcccccaaccacaagctgctgcagtacggagacatggaggagggcgccagcccgcctaccctggagagtctgcccgagcaactccctgtggccgacatgagggcactcctgacaggcaaggactgcccccatgtccgggagaagggctccgggaagcagaacaaggacctctatgagttggccttctcaatcagctatgaccgtggggaggaggaagcgtacctcaacttcattgccccctccaagcgggagttctacctgtggacagatgggctcagtgccttgctgggcagtcccatgggcagcgagcagacacggctggacctggagcagctgctgaccatggagaccaagctgcgtctgctggagctggagaacgtgcccatccccgagcggccaccccctgtgcccccaccccccaccaacttcaacttctgctatgactgcagcatcgctgaaccttgacagtgtggctggccatgggccacagctgcggccactgcagcagccatgaagggcagtgggtagaggagtgcaggcaccctgaccagcagagattgctgcagaaataaagtctgcttggctcttggg

SEQ ID NO: 57394 - DNA, 3631 bp, Homo Sapiens
tgagtcccggccggagccccacggccgcgggcggcgcctaggacggcgatccgcgccctggaggatccgccggccgcccggctccactacagctccagccgcctgcagcggggccctcctgaggccccagaggaagagaccatgaaagtgaggtcggccggcggcgatggagatgccttgtgcgttacagaagaggacctggcgggtgacgacgaggacatgccgaccttcccatgcacccagaagggccggccagggccccgctgcagccgctgccagaagaacctatctttgcacacatcggtgcggattctttacctcttcctggccctgctcctggtggccgtggctgtgttggcctctctggttttcagaaaagtggactctctctccgaagacatctccttgacccagtctatttatgacaagaagcttgtgttaatgcagaaaaatctccagggcctggatccgaaagccctgaacaactgctctttctgccatgaagctgggcagctggggccagagatccgaaaactgcaggaggagctggagggaattcagaagctgcttctggcccaggaggtgcagctggaccagaccttacaggcccaggaggtgctctccaccaccagcagacaaatctcccaggagatgggcagttgctccttctccatccaccaggttaaccagtctctggggctcttcctggcccaggtgagaggctggcaggccaccacagctggcctggacctctctctgaaggacctcacccaggagtgctacgatgtcaaggctgcagtgcaccagatcaacttcaccgtggggcagacttccgagtggatccacgggatccagcggaagacagacgaggagaccctgaccctccagaagattgtcaccgactggcagaactacacacggctcttcagcggcctgcgcaccacctccaccaagactggagaggcggtcaagaacatccaggccaccctgggggcctcctcacagcgcatcagccagaactcagagagcatgcacgacctggtactccaggtcatgggcttgcagctgcagctggataacatctcgtccttcctggatgaccacgaagagaacatgcatgatcttcagtaccatacccactacgcccagaaccgcactgtggagaggtttgagtctctggaaggacgcatggcttctcacgagattgaaattggcaccatcttcaccaacatcaatgccaccgacaaccacgtgcacagcatgctcaagtacctggatgacgtgcggctctcctgcacgctgggcttccacacccatgccgaggagctctactacctgaacaagtctgtctccatcatgctgggcaccacagacctgctccgggagcgcttcagcctgctcagtgcccggctggacctcaacgtccggaacctctccatgatcgtggaggagatgaaggcagtggacacacagcatggagaaatccttcgcaatgtcaccatcctacgaggtgcccccggccctccaggaccaagaggattcaaaggagatatgggcgtgaaagggcctgttggcggcagaggcccgaaaggagaccccggcagcttgggccccctgggaccccagggtcctcaggggcaacctggagaggccgggcctgtgggagaaaggggccctgttggccctcgagggttcccaggcctcaaaggctcaaagggcagctttggaactggagggccgagaggacagccaggcccaaaaggggacatagggcccccagggccagaagggcccccggggtctccagggccctcagggcctcagggaaaaccgggaattgcagggaagacagggtcaccaggccagcggggggccatggggcctaagggtgaaccagggatccagggtccccctggtctcccggggcctccaggtccaccaggaagccagagcttctactgaggagggctgtggcagagccactgtcacacagaatgccggaggggcgcagagcagatccaggccccagaaagcctcacctacagacagctgtggtcctctgattccaatgagggggctccccagggctgaccctgcagctttgggctcccccatagtgactgtgccataggaaagcagcccctcctcacacatacatgtgcacatgcacacacatgcatgcacacacatgcacacatacacgcacatgcacacatacacatgcatgcacacatacacaggcatacatgcatgcacacacacatgcacgcacacacacatgcacacatacacgtgcacacatacacaggcacacatgcatgcacacatacacatgcacacacacatgcacacatatatgcacaggcacacacatgtacgcacacacacatgcactgcacacatatccatgcacacaaacacatatatacacatgcacatacacagatttttctgctggccaggtgggccaactgggtttccctggctgggcaggaggagagggcagaggaagaccccctctcctgtgactgagcctgccagggaggcagctacctcgggaggaaggtctcacatctgtctctgggcacccatgctggccagcagtttcccagggctccctggggttgaaaagccccaaggaaacctttgcgggtggggcgttactgccaaaactccagaggcaaagtggacctggcaaccacaagaccctccccataagcaggggaccagcatacccgggagctgtccctgtctgtcacagcacagtggggccacgaggctgacattctctggccttgcacacagtgccccctgagaagttcaacatttatttcttcacgtgtccagaaaattcctcaattcatccttgcctctgcccttcaggagcagcctggaaggaatccaagcaggagtttcatctgcatgggggcactctgcaggccctggaacattgggcctgagtggagatgggagacagaggcaggccagaaggttctctctgcacagctgcctcccttgctctccctgaggctggcctgccccattccccaagggggctcctctggagtggtggggaggattaggctgcagaagggccaaccccttgcaacagggcagctctcgcctcccgcacacggctctcctgatcacagctgcatgccgaccttgtcccaccgggacccacaatggcccgagccctctttgcatgggcagccagctggactaggagtgggaagggcctggacactcacagaggccccctctgtcatcactccttggcacccaccaacttcctgcacacactggcagagaggggcgctgggaaatcaccccacagggtggaggtctcctgttggctacactctaaagctgctttgccttcatgttcaaacagattcaggcaccaccccctccaccgcccgcaaggttagggcatagagttgtctccttcccaacacggacccagagagcagcccttccctgctcaaagcctttccgcaccctcctgactgtcctggatgtgcaactggtttgcactgcacaccccacggccatgtaactctcctgtccacatatgataataccattctgcatagtattactgactcagtaaagagctatttccaggagt

SEQ ID NO: 57395 - DNA, 1102 bp, Homo Sapiens
agcggagaggtttcagcaacaccagtggcctacagagaaggagccttcctcctctccccagactccagactctaaagggcgacctcctcctgctcctgctcctggagcgcagccagcgcacagcgtttccgcaggaatcttgagaatggcaaggcccgcacacccgcggtggttcccaggcccgccccctctcgcagctgcagccccacctgccagtgcgtgccgcctccgagcgacttccgggagccgggcggccaccgcggtgcaggcgcgcgcccaaaggctttgcgaggctcactcggtctgagaggtcggaggctgcgagtgtcgctgctgaaggctgtggtggaccgggctggatcgcggattttggattagataatagatttgggatcgccgattgggggttggattgcggatttggggttggataggggatttggggctgggtcggcgggggcaggggcggggaggtgaaaaggtgacagggagctgcctcctctcaagagcagttggttgggagtctgagaagtcaccaccatgaagttgttcggcttcaggagccacaggggccagacggtcctgggcaccatagaccacctgtacacgggttccgggtaccgaatccggtactcggaactgcagaagatccacaaggcagctgtcaagggcgacgccgcggagatggagcgctgtctggcgcgcaggagcggagacctggacgccctggacaagcagcacagcagtgtgtccccaagaaagtgtcagagcctttacgtggaccttcccatggaaaaggaaacagaatagtcaatggaaaaggagaaggacctcctgcaaaacatccttccttgaagcctagcactgaaatggaagatcctgctgtgaaaggagcagtacaaagaaagaatgtacagacattgagagcagaaaaagccttaccagtggcttcagaggaagagcaacaaaggcgtgaaagaagtgaaaagaagcaaccacagctaattttagaacatgcactctgacagaaaagacatctgagaaacaaaacaagcaaatttgttttcctttttgcacctgccaaaaaaaaaaaaaaaaaaaa

SEQ ID NO: 57396 - DNA, 2508 bp, Homo Sapiens
ctttctgctgttaccgggagcgcggtggccacggaacgctgcccggagccgcgcgagggaggacccgacgcgcggcgtttacccagcgcagcgttccaccgctcgggtttggctggaatagctctccagacccccagctggccatgtggtgagttcagggcccaaatcaagtagtaccagcaatcagggaactcctatctgttttgaatggattcacaccagccacaagcctggaaagatggtgtcacaatctacagtcaggcaggattctcctgtggagccctgggaagggatcagcgatcactctggcattattgatggttcgcccagactcctgaacactgaccatcctccttgccaattagacatcaggctcatgaggcacaaagctgtctggattaacccccaggatgtgcagcaacagccgcaggacttgcaatctcaggtgccagcagcagggaacagtgggacccattttgtgacagatgctgcctctccctcaggcccttcaccttcgtgcctcggggactccctggcagagacaacgttgtctgaggataccacagactccgttggcagcgcttctccccatggctcgagtgaaaagagtagcagcttctctctgtcctcaacagaggtacacatggtccgcccaggatactctcatcgggtgtctctgcccacaagccctaggattttggccacctccccatatcctgagactgacagtgctttttttgagccttcccatctgacatctgctgctgatgaaggtgctgttcaagtcagtagaagaaccatttcttcgaattccttctcaccagaggtatttgtgctgcctgttgatgtagaaaaggaaaatgcccacttttatgttgcagatatgattatatcagcaatggagaaaatgaagtgtaacattctgagtcaacagcagacagagagctggagtaaagaagtcagtgggttacttgggagtgatcagcctgactctgaaatgacttttgataccaacataaagcaagagtctgggtcttctacttcttcatacagtggctatgaaggttgtgctgtgttacaggtcagcccagtgactgaaacacgtacttaccatgatgtgaaagagatttgcaaatgcgatgttgatgaatttgttattttagagcttggagattttaatgatatcacagaaacctgtagctgttcctgcagctcctctaagagtgtcacttatgagccagacttcaattctgcagaactattagccaaagagctgtaccgcgtgttccagaagtgctggatactgtcagtagttaattctcagctggcaggttccctgagtgcagctggctcgatagtcgtaaatgaagagtgtgtccgaaaagactttgaatccagtatgaatgtagtacaggaaattaaatttaagtctaggatcagagggactgaagactgggctcctcctagatttcaaatcatatttaatattcatccaccactcaagagggaccttgtggtggcagcccagaattttttctgtgccggctgtggaactccagtagagcctaagtttgtgaagcggctccggtactgcgaatacctagggaagtatttctgtgactgctgccactcatatgcagagtcgtgcatccctgcccgaatcctgatgatgtgggacttcaagaagtactacgtcagcaatttctccaaacagctgctcgacagcatatggcaccagcccattttcaatttgctgagcatcggccaaagcctgtatgcgaaagccaaggagctggacagagtgaaggaaattcaggagcagctcttccatatcaagaagctgttgaagacctgtaggtttgctaacagctgtgtcaaggaaagggctttatttgtgaattttgccagaatacgactgtcatcttcccatttcagacagcaacatgtagaagatgttcagcgtgcagggcttgctttcacaaacagtgcttccagtcctccgagtgcccccggtgtgcgaggatcacagcgaggagaaaacttctggaaagtgtggcctctgcagcaacatgatgcccctgagtactgtgaaaaagactgttcaacatgccttatgataacaccgatttgtgtctattattggtgacattgttttagatattgggtattgtatattaaggaaaaagatggtctatattctctttattgcatatacttaatgtttcaaaagaatgcagattctgtgtttaagcacagggctgatagttgtggttttgtttacaaatgttctgttttggctgctattggttttttaaagaggttttttatacttttgtatttgaatagttatgtttcactgatgctgagccagtttgtatgtgtgtgcatatatgtgaactgtaactgacaagatgaattactcagtttctctttctctaaagcttgtttgatgaaactggttggtcctttcagtgaacaaaaatatgaccccaaaaaaaaaaaaaaaaa

SEQ ID NO: 57397 - DNA, 4791 bp, Homo Sapiens
acctcaaatattgctttagggtcatcattttctaaagaatcaggaaaaaaacagagaatgaaaggagttcagcaaggtattgaacagagagttaaaagttttaatgttggtcgtggacgtggcttgccgaagaaaatcaaacgaaaagaacgtgggggaagaaccaataaagggcctaatgtgttttcagtatcggatgactttcaagagtataataaaccagggaaaaaatggaaggttatgactcaggaatttattaatcagcacacagtggaacacaaaggaaaacaaatctgtaaatacttcctggaagggaggtgtattaagggagatcagtgtaaatttgatcatgatgcagagttggagaaaagaaaagagatctgcaaattttatttacaaggatattgtaccaaaggagagaactgcatttatatgcataatgaatttccatgcaagttctatcatagtggagcaaaatgttaccagggagacaactgtaaattttcccatgatgatctaactaaagaaacaaagaaacttttggacaaagtgttgaatactgatgaagaactcataaatgaagatgaaagagaattagaggaacttagaaagcgtggcataactcctcttcccaaaccacctccaggggttgggcttctgccaacccctccagagcattttcccttttctgatcctgaagacgattttcagacagatttctctgatgattttaggaaaattccatctctttttgaaatagttgtaaaacctactgtggatttagcgcataaaattgggaggaagccaccagcattttataccagtgcctcaccaccaggaccacaatttcagggaagcagtccacaccctcaacatatctatagttctgggtcaagtccaggtcctggacctaacatgtctcagggacacagtagtcctgtgatgcacccaggctcccctggacatcacccatgtgcaggacctcctggtctaccagtgccacagagcccacctttaccacctggtccacctgaaattgtaggtcctcaaaatcaagctggagtgcttgttcaaccagacacatctttgacaccaccaagtatgggtggggcttaccactccccaggctttccaggacatgtgatgaaagtacccagagagaatcactgttctccaggctcatcataccagcaaagtcctggtgaaatgcagctcaacaccaattatgagtccctgcaaaacccagctgagttttacgataattactatgcacagcattctatacataattttcagccacccaataactctggtgatgggatgtggcatggtgaatttgcccagcagcagcctcctgttgttcaagactcacctaaccatgggagtgggtctgatggcagcagcactaggacaggccatggccctctgcctgtaccaggcctcctccctgcagtgcaaagagctctttttgtaagacttactcagagataccaagaagatgaagaacaaaccagcacccaacctcatagggcaccaagcaaggaagaagatgatacagttaactggtattccagtagtgaagaggaagaaggaagcagtgtcaaatcaatactgaaaacattacagaaacaaacagaaactttaaggaatcagcaacaaccttccacagaactcagcactcctactgatccaagacttgctaaagagaaaagtaaaggaaaccaagtggttgaccctaggcttaggactatcccaaggcaagacattagaaagccttctgagtctgccccactggatcttagacttgcgtgggatcccaggaaattgagagggaatggaagtggtcacataggctcttctgttggtggagcaaagtttgatttgcatcatgcaaatgctggcactaatgtcaaacacaaaagaggcgatgatgatgatgaagatacagaaagagaactgagagaaaaagctttcttaatacctttggatgcctcacctggcataatgctccaggatccaaggtcacaattgagacagttcagtcacattaaaatggacattactctaaccaaacccaactttgcaaaacacatcgtgtgggctcccgaagacttacttccagtacctttacctaaacctgatccagtgtcttcaatcaatttacctctgcccccacttatagctgaccagaggctaaatagattatggaatacaaaaagtgatcttcatcaaaacacagtgtccattgatccaaaattagcagccaaagccaaaattaacacaacaaacagagaaggctacctagaacaatttggagactcacacggttcaggagctaaattaggagatcctagactacaaaaaaattttgatcctaggcttcacagactgcccaatacagagtctcatcaagtggttatgaaggattcacatgcatcaaagggtgcccctcacttacccagatcaaaccctggttcatcacagccctcaggggcaggaactagcaattctggttccggggctctgcctccatatgcccctaaactctcttcctcagctggccttccactgggaacttccacttcagttcttagtggtattagtttgtatgaccctagggatcacggttcatcatccacatcagagctagcaacagcttcttcaggagaaaactcaaagaaccagaaaaaaagtggtggcttaaaaagtagtgacaaaactgaaccttctcctggagaagccatccttccacaaaaacccagtccaaacgtgggagtcactcttgaggggccagctgacccacaggcggacgtccccagagttctggtaaggttcaggtcccagcagtgcacagccttcctgttcaggcattaacaggcttaattaggccacagtacagtgatccaaggcaggcaaggcagccaggacaggggagcccgaccccagataatgatcccggtagagaaacagatgacaaatctctgaaagaggtttttaaaacttttgatccaaccgcttcaccattttgttagctattgtgtaactgagcaattcttttcactcttgtgactatctcagtcctctgctgttttgtaactggtttacctctatagtttatttatttttaaattataaacacttttcagctgctagtatcagaaccacatgaagttatagcctctaaagcctgtggtattttatataatatttttataactttaagagactgtagtaattgacctaaaaacttatgttagcttcagtaaaagtacttttattgtaaataaacaatcatgaactcaacactctgcctgaatatatgccagttgtctttcataatcaatgtttagataaatgattgccactttttatatggttgtttagtttcaagcaatatgatgtacattacttttgagaaacagtattttgactaggacctctcttatttgtcagcacagaactgattaatatgtaatgctacctgctaattaaaatgtaaaatcaagtaaagaaaacattttaaaattacaattagcagagcagttcatgtttaagggcatcacttttattagtattggcaatattatttgtgtaaatgaagcatttgaatgtcatatctttttaaagtattttattgtatactgtatcatagaagttggaggtatataaatagaacattttgctaaagtgaaaaatttccaagttctctagcataactttttacatttaatttttcatatgaaatagcaattagttactgctgtgttacattgtgatgtttatgtatgtcaatgtttttgtctttaacagcataatttatattgctttttcaaatgatgtagctgcattaattgtgttcatcatgactttggcgatttttaacaaaatttttaaagacccagtgagagtctgtagtgattattacacggataatgttttaaatgtctaggttctgtatttttttcttaaatagcaagaaaatacagattgctagtatagtcaacagtatttggctatcaataaagaatctctttaagatctcacccggctggcattctgtaacagaggggattacctggtgttttaagtatttaatgtcctcatagtgtggaaatcccctaaattgattagaaattgtattttatgaaaaataacttgtattcattcttgtgtatttattacaatatataaataatggcaactctttgttttatacatatataatttataactgaatctaagtattagactgctactcatattttgaactgcaggtgtaggacagtgtttgctggtaacaactccagtgtgtattaataacttgaaaaggagcatttcactataaaagataatgaagtaggtaatgaaatcagtccttgaatgaaagcagtgcccttgagaagggatttttttttaaatatacagtaaaatatttcgtgggaacctaacactcacatagcatatggtttattaataatgcatatcctttctaatcacttcttcaattctttttgctgcagttctgtgctaaaatggggttgtggttaagtgaacgagaactctgcctacctaagaagttcattgtgttctaagtggaaggagagttactgaagggaatgtgaatttttaccgtttgtacttaagatacattggttgtctaaaatggctctggataacatttttgggttaaaaaatgtaatttaaagccaccatagaaagtattttctgatttactgtccaaatgaattttgttgttaattgagaagtcaataaaatggattaaactgacag

SEQ ID NO: 57398 - DNA, 2202 bp, Homo Sapiens
gcagggagtgcgggtcggttctgcgtgcgctgccggacgaggctcccgccgccgattgacccgcgctccgcccgtagtcgggccgttctgttccaagagataaccattgggaccttggtagctaatgtccgaagaaagtgactctctgagaaccagcccttctgtggcctcactctctgaaaatgagctgccaccaccacctgagcctccgggctatgtgtgctcactgacagaagacctggtcaccaaagcccgggaagagctgcaggaaaagccggaatggagacttcgagatgtgcaggcccttcgtgacatggtgcggaaggagtaccccaacctgagcacatccctcgacgatgccttcctgctgcgcttcctccgagcccgcaagtttgattacgaccgggccctgcagctcctcgtcaactaccacagctgtagaagaagctggcccgaagtcttcaataacttgaagccatcagccttaaaagatgtccttgcttccgggttcctcaccgtgctgccccacactgaccccaggggctgccatgtcgtctgcatccgcccagacagatggataccaagcaactatccaattactgaaaacatccgagccatatacttgaccttagaaaaactcattcagtctgaagaaacccaggtgaatggaattgtaattcttgcagactacaaaggagtgagtttatcaaaagcatctcactttggcccttttatagccaaaaaggtgattggcatcctccaggatggtttccccattcggataaaagcagtccatgtggtgaatgaacctcgaatatttaaaggcatttttgccatcataaaaccatttctaaaggagaaaatagcaaacagattcttcctccatgggtctgacttgaactctctccacacaaaccttccaagaagcatcctccccaaggagtatgggggcacggctggggagctggacactgccacctggaacgcggtactgctggcttcagaagacgattttgtgaaagagttctgccaacctgttcctgcctgtgacagcatcctgggccagacgctgctgcccgagggcctgacctcagatgcacagtgtgacgactccttgcgagctgtgaagtcacagctgtactcctgctactagcccgtcccccagggtcaccatctttaattcttttccttcttttctttggagaggcacaaggagaatttaagggtccatggattcagtcttgctccttgtaattaaactgcaggatggaggaacagcctgagatatgagcatgagcccattttggggtaagcctttggttactttaattactccatggaagacatggaaaatgtccccactgattcttaaacatttggaatcccagtctgcaactattaatctggaggctatatctattttgttttgctttttggttggggggtggtgatctggttcttacacatcttggaagcaagaacaatcaggaccaaagtcactttgatcccacttttccaggagaaaaaccacctgtttggccagtgagaactacttgtatgaaataatttggccaaaccttcagtgtgaccaaatgtgagactgggagtttgtgtttttcacaggaaccctaagtatagacctctgctgctcatcaggaaacttactggagatgaaggccccagctgttgtcaccgggtttggaaagcaccttaactgaatcatgtaagcatcaggacataagcagcactttgtggtcaaatgtggaagccggagacttcaaagcacctctgggacccactggttgaagtttgcaatagaaacttaagttttcccaaatccataaagccttagccctggttctcaatagaatcagggacctagcaggaaatgattttactcaacctaaaatgctggatcccaggcccgtgtagctataagaattctggcctggatcccaggtgtacaactatggacaagatatgggcctctactttctcctctataaaatgaggctggatgaaatgtcagctagggccattttggctgctgaggctctgggatttggtttagttactgaatgttagattttctgcctagaaagataactatctagatacaagtggttggatcctgtttttgtttgtggtacatgtgtctttccaagagagatgtgtcaccaattaaaaaaaaaaaaaaaaaaa

SEQ ID NO: 57399 - DNA, 2179 bp, Homo Sapiens; identical to SEQ ID NO: 30727

SEQ ID NO: 57400 - DNA, 1945 bp, Homo Sapiens
acttttggtcgagcggagggcgcgcagctccaccgttgccaagacgccgcgtaaacacccgagcgcgcgcagccaggtgcgctccttggggctgctggctgctgcgtttgcggcgggaggtggtggccgcggtcccacgagaaggggtatttttcgtcagccaagatgggttccaaaaggagaaatttgagctgtagtgaaaggcatcagaaattagtagatgaaaactactgcaaaaaattacatgtccaagctctaaaaaacgtcaacagtcaaatcaggaatcaaatggtgcagaatgaaaatgataaccgtgttcagcgcaagcaatttctcagattattacaaaatgaacaatttgagttggatatggaagaggccattcaaaaggcagaagaaaacaagagattgaaagaactccagctcaaacaagaagaaaaactggctatggaattggcaaaactgaaacatgaaagtctaaaggacgaaaagatgaggcaacaagtaagagaaaacagcattgagcttagagaattggagaagaaattaaaagcagcttacatgaataaagaaagggcagctcagattgctgaaaaggatgccattaaatatgaacaaatgaaacgtgatgctgaaatagccaaaaccatgatggaagaacacaagagaataataaaggaagagaatgctgcagaagacaaacgaaacaaagcgaaagcacagtactatcttgacttagagaaacaacttgaagaacaagaaaaaaaaaagcaggaagcttatgagcagctgctaaaagagaaactcatgattgatgaaattgttaggaagatctatgaagaagatcagttggaaaaacaacaaaagttagaaaaaatgaatgcaatgcgaaggtatatagaagagtttcagaaagagcaggctctctggagaaaaaagaaacgtgaggagatggaagaagaaaacagaaaaatcatagagtttgctaacatgcagcagcaaagagaagaagatcggatggcaaaagttcaagaaaatgaggagaaaaggctacagcttcagaatgcgttgacacagaaattagaagaaatgctgcggcaacgtgaagatttggaacaagtgcgacaagaattataccaggaagaacaagctgaaatatataagagcaagctaaaagaagaagcagaaaagaaattgagaaagcaaaaagagatgaagcaagattttgaagaacaaatggccttgaaggaattagtgctacaggctgcaaaagaggaagaggagaactttagaaaaactatgctagctaaatttgctgaggatgatcgaatagaattaatgaatgctcagaaacaaagaatgaagcagctggaacacaggagggctgtggaaaaacttattgaagagcgtcgccaacaattccttgcagacaaacaacgtgaactagaagagtggcagttgcagcaaaggcggcaaggatttattaatgcaattattgaagaagaaaggctaaaacttcttaaagagcatgctacaaacttactaggctatctccctaaaggagtatttaaaaaagaggatgatattgatctgcttggtgaagagttcaggaaagtatatcaacaaaggagtgaaatttgtgaagagaaatgatatcatcaaaattgggtaaagcatagattttttgtatgttaccactagatgtcagcataacttttgttttacagctcagtggcattaggtatccattgtctgtttggattttgtaaatcatcactgaatttcataacttgtaaacaattatcagatacaaattaattttaatcaagctgttatttttgtactgataatttcaaaatccgatttctacaacactacagagcactgtttgcatccccatcctcaagacagtatatttaccttgactaatacagaactctacccc

SEQ ID NO: 57401 - DNA, 1832 bp, Homo Sapiens
attgctctcctgccacggaggggagcgcttggtggcagtccgcgggcccggacggaaggctgaggcgacgcctcgacgacagcggaccggagctgcaggggcaacacattcagggcggggtgccccatttaggcctggctcaccggagtaagaaactacaacccccgaagtgccttgcgcctcaaggttacggaggcagtgaccacccaccctggagccatggtccacgccttcctcattcacaccttgagggccccgaatactgaggacacgggcctttgccgagtgctgtactcctgcgtcttcggtgctgagaagtcacctgatgacccacggccgcatggtgccgagagggacaggcttctccggaaggaacagattttagctgtggccaggcaggtagagtcaatgtgtcggctgcagcagcaggcatctggccggccccccatggacctgcagccgcaatcctcagatgagcaagtgccgctgcacgaggccccacgtggggctttccgcctggcagcagagaaccctttccaggagccacggacggtggtgtggctgggcgtgctctcgttaggctttgccctggtgctggatgcccatgagaacctgctactggctgagggcacgctccggctgctgacacgcctcctccttgaccacctccggctgctggcgcccagcaccagccttctgctgcgggctgaccgcattgagggcatcctcacccgcttcctgccacatggtcagctgcttttcctcaacgaccagtttgtccaaggcctggagaaggaattcagtgccgcttggccccgctgattcctcgttgggatggtgcttctgagggcaggcagagggtagacacacagccagatgaagcttggcatctccctcctacccagcagctctgatgtgctgctataccaggacaagtgggtgacacaagcctgcagaaagggggctgggcagagggtggaggaggtcctgcctgtcctcaggttagtggaaccacagaacttcctgagcctagagctgctgtgttacttagaccgctgccgtgcggcagccacgcttgtccttgaacccaccttcctccatccctgccagccgatagtgctagggtgaggagctgcctggagctcaccccgctcttcttccaaacccacagtcaaggccaggcgcggtggctcacgcctgtaatcccagcactttgcggggctgaggtggttggaccacctcaggtcgggagttcaagaccagcctggccaacatagtgaaaccccatctctactaaaaatacaaaaattagctgggtgtatggcgcccacctgtaatcctagctgctcagggggctgagtcatgggaatcacttgaacctgggaggcagagtttgcagtgagccgagagtgcgccacttcactccagcctgggcaacagagtgagactccatctcaaaaaaaaaaaaaaaatcccacagtcatcgaaacacaaaaggggtctcagactcccctgagggtggaggagctgtgcctgcatgctggcaggccacagcccctggctttgtgcccacttaggcagtattatcaacaaggtcctgctcagtgtccagcccccgctgagttcagaaatgcatctgccaatcagcagcaggattctgcagctccttttgtgccaagcccgttcccaccaggcaggctcgagataaagtcatcacagccttccctcatctgcagggagagaagttgctgtcagatgaatgtgagcagtctagcctggatgacatatttttcgttttgaattaaaagcactggctgtgtgattttaccctc

SEQ ID NO: 57402 - DNA, 4909 bp, Homo Sapiens; identical to SEQ ID NO: 29981

SEQ ID NO: 57403 - DNA, 2166 bp, Homo Sapiens
cgcgcgccgggcacgcgcgccggcgaccatggcgttcgccgggctggagcgagtacattaacccctggaggcggcggcggcggcgagggagcgagcctcgagcgggcgggccccagcctgagggaagggaggaaggggcggggagagcgccagagggaggccggtcggccgcgggcgggcgggcagcgcagcgccgagcggggcccgcgggcccatgaggaggcctggggaccatgggctccaggatcaagcagaatccagagaccacatttgaagtatatgttgaagtggcctatcccaggacaggtggcactctttcagatcctgaggtgcagaggcaattcccggaggactacagtgaccaggaagttctacagactttgaccaagttttgtttccccttctatgtggacagcctcacagttagccaagttggccagaacttcacattcgtgctcactgacattgacagcaaacagagattcgggttctgccgcttatcttcaggagcgaagagctgcttctgtatcttaagctatctcccctggttcgaggtattttataagctgcttaacatcctggcagattacacgacaaaaagacaggaaaatcagtggaatgagcttcttgaaactctgcacaaacttcccatccctgacccaggagtgtctgtccatctcagcgtgcattcttattttactgtgcctgataccagagaacttcccagcatacctgagaatagaaatctgacagaatattttgtggctgtggatgttaacaacatgttgcatctgtacgccagtatgctgtacgaacgccggatactcatcatttgcagcaaactcagcactctgactgcctgcatccacgggtctgcggcgatgctctaccccatgtactggcagcacgtgtacatccccgtgctgccgccgcatctgctggactactgctgtgctcccatgccctacctcataggaatccatttaagtttaatggagaaagtcagaaacatggccctggatgatgtcgtgatcctgaatgtggacaccaacaccctggaaacccccttcgatgacctccagagcctcccaaacgacgtgatctcttccctgaagaacaggctgaaaaaggtctccacaaccactggggatggtgtggccagagcgttcctcaaggcccaggctgctttcttcggtagctaccgaaacgctctgaaaatcgagccggaggagccgatcactttctgtgaggaagccttcgtgtcccactaccgctccggagccatgaggcagttcctgcagaacgccacacagctgcagctcttcaagcagtttattgatggtcgattagatcttctcaattccggcgaaggtttcagtgatgtttttgaagaggaaatcaacatgggcgagtacgctggcagtgacaaactgtaccatcagtggctctccactgtccggaaaggaagtggagcaattctgaatactgtaaagaccaaagcaaatccggccatgaagactgtctacaagttcgcaaaagatcatgcaaaaatgggaataaaagaggtgaaaaaccgcttgaagcaaaaggacattgccgagaatggctgcgcccccaccccagaagagcagctgccaaagactgcaccgtccccactggtggaggccaaggaccccaagctccgagaagaccggcggccaatcacagtccactttggacaggtgcgcccacctcgtccacatgttgttaagagaccaaagagcaacatcgcagtggaaggccggaggacgtctgtgccgagccctgagcaaaacaccattgcaacaccagctacactccacatcctacagaaaagcattacccattttgcggccaagttcccgacgagaggctggacctcttcatcacattgacttacgccgttgcttttccagactgggcagaggggctgacttcgcagtgtgtgccaaagagccggtgtctgataatcccattttcctgcttatcacctgaactgtgtcagtatcacttttagttttgttggttggttggtttgttgtttgtttaatatgccctgttttctacttctgttggaaaatatttggggttgaaataaaccagtgggagcatggaaaaaaaaaaaaaaaaaaaaaaaaaaaaaaaaaa

SEQ ID NO: 57404 - DNA, 2460 bp, Homo Sapiens
ggcgggagggcccggcccgatttcccttgctgctccccttgtggcctgacgctgacagaggcaaaaatctgctaactcagggggcagactcaaccaagactgtgagcaggcctggggaatgaccccccgatctccaaccagtgccttccgcagctgcacggctgtctccagctgtctctgcccctcttcctggccctggctccatctctctgtcacctcacccttccctgtgccacatgggccctctctctcctgccaggacgctgcggctctggggacctcggagcctgggggtggctctgggagtcttcatgaccattggctttgcactccagctcttgggagggcccttccagaggaggctacctgggctacagctccgacagccctcggccccatccctacgaccagcccttccgtcctgcccaccccggcagcgactggtgttcctgaagacacataaatccgggagcagctctgtgctgagcctgcttcaccgctatggggaccagcacgggctgcgcttcgccctccctgcccgctaccagtttggctacccaaagctcttccaggcctctagggtaaaaggctaccgcccacagggtggaggcacccagctccccttccacatcctctgtcaccacatgaggttcaacctgaaagaggtacttcaggtcatgccttctgacagcttctttttttccattgtccgagacccagcggctctggctcgctctgccttctcctactataaatccacctcatcagccttccgcaagtcaccatctttggctgccttcctggccaatcctcgaggcttctacaggcctggggcccgtggggaccactacgctcgcaacttactatggtttgactttggcctgccctttcccccagagaagagggccaagagagggaatattcatccccccagagaccccaaccccccacagctgcaggtcttgccttctggtgctggccctcgagcccaaaccctcaatcccaatgccctcatccatcctgtttccactgttactgatcatcgcagccagatatcaagccctgcctctttcgatttggggtcttcatccttcatccagtggggtctggcatggctggactctgtctttgacctggtcatggtggctgagtacttcgatgagtcattggttctgctggcagatgccctgtgctggggtctagatgacgtggtgggcttcatgcacaatgcccaggctggacataagcagggcctcagcactgtcagcaacagtggactgactgcggaggaccggcagctgactgcacgggcccgagcctggaacaacctggactgggctctctatgtccacttcaaccgcagtctctgggcacggatagagaaatacggccagggccggctgcagacagctgtggccgagctccgggctcgccgagaggccctagcgaaacattgtctggtagggggtgaggcttctgaccccaaatacatcactgatcgccggttccgccccttccagtttgggtcagctaaggttttgggctatatacttcggagtggattgagcccccaagaccaagaggaatgtgagcgcctagctacccctgagctccagtacaaggacaagctggatgccaagcagttcccccctaccgtctcactgcccctcaagacttcaaggccactctccccataaacatcagactacagatttaggtggaagagcagccatgtttgaagggcacatgtgatgagtggggggcagcaagatgccatttctgcatctcccagaagggatgagtctttgtcccgatgcaagccccctcttcgctgggctcccagcagtgcttccctcctccaccctccactcattttgttctttccccccaacttttttttttttttgaaacggagtcttgctctgtcccccaggctggagtgcagtggcatgatctcggctcactgcaacctctgcctcccaggttcaagcgattctcctgcctcagcctccagagtagctaggattacagatacgtgccaccatacccggctaatttttatatttttagagacagggattcaacatgttggttaggctggtcttgaactcctcacctcaggtgatccacatgactctgcctcccaaagtgctgccattacaggcgtgagccactaggcctgacctccccttcccctttcctgccccaaggcagatccacatcaccgaagctccctagaggggcaaaagatggagtgagccacaggaagtttggggcgtggtgagttggaatgatacgtccatttctctatgaaatatttgctactagactgttcatttctctctgacatgtttgttgaatgaataaataatttgaaacttaaaaaaaaaaaaaaaaaaaaaaaaaaaaaaaaaaaaaaaaaaaaaaaaaaaaaaaaaaaaaaaaaaaaaaaaaaaaaaa

SEQ ID NO: 57405 - DNA, 1452 bp, Homo Sapiens; identical to SEQ ID NO: 23444

SEQ ID NO: 57406 - DNA, 1938 bp, Homo Sapiens
cccagaccgagaaggtcggaggcagaagccgggaaggagacttctgaatgaacagtgaatctattactgaggaaaaccagaggaagcctgtgtagataggtatcaattagataccagctactggaagagctttctcagagactgattaaaaaattctccactagatatggctgcaaattgcacatcctcatggagtctaggagaatcctgcaacagacctgggttggagctgccacggtctatggcatcctcagaaactcaacttggaaatcacgacgtggaccctgagatttctcacgtgaacttcaggatgttcagctgcccgaaggagtcggaccccatccaggctctgaggaaactcactgagctgtgccatctgtggctgaggcccgacctccacaccaaagagcagatcctggacatgctggtgatggagcagttcatgatctccatgccccaggagctccaggtcttagtcatgatgaacggtgtgcagagctgcaaagacctggaggacctgctacgaaataacagaagacccaagaaatggtctgtggtcaccttccacggaaaggaatatattgtgcaggactcagatatcgagatggctgaagccccctccagtgtcagagatgatctgaaagacgtgtccagccaacgggcctcctcggtgaaccagatgcgtccaggggaaggccaggcccaccgagagctgcagatcctgcccagggtccctgcattgtccaggaggcagggagaggactttctgctacacaagagtattgacgtaacaggtgacccaaagtctctgagacccaagcagaccttggagaaggatctgaaggaaaacagggaagagaacccaggactgacatccccagagcctcagcttccaaagagtcccacagatctggtgagagcaaaggaggggaaggaccccccaaaaatagcctctgtggaaaatgtggatgctgacacaccttctgcctgcgttgtggagagagaagcttcgactcacagcgggaacagaggagacgctctgaatctgagcagtcccaaaagaagcaaaccagatgcctcctccatttcccaagaagagcctcaaggagaagccacacctgtgggcaacagagaatccccgggacaagctgggatgaattcaattcattccccaggccctgcgagcccagtcagtcacccggatggccaagaagccaaggcactgccgccctttgcatgtgacgtgtgcgagaagaggtttacgtgtaattccaagctagtcatccacaagagatcacacacaggcgagagactctttcaatgtaatctctgtgggaagcgcttcatgcagcttattagcctccaatttcaccagcgaacccacactggcgagaggccctacacgtgtgacgtctgccagaagcagttcacccagaagtcctacttgaagtgtcacaagagaagccacacaggggagaagcccttcgaatgtaaagactgcaagaaagttttcacctacagggggagcctgaaggagcaccagcgcatccactccggagagaaaccctacaaatgttccaagtgtccaagagccttcagtcggctgaaattgttaagacgccaccagaaaacacatccagaagctacttctcagtgattgcataatccggtctatgccttctgcaccaagaagaagtgaatgatatttttcatcaatgttatcagatgacatttgacacatgcaagggcgtctgacacacagagggagtgccctagatatgaattgccaggatgtttgagtaaatatgtgtcctccccactgagctttgttttctgtttcattatgtccattgttttcttataggtttattttggtttgtgttgctgttcttccaataaacgatcatcttattagttttcaaaaaaaaaaaaaaaaaa

SEQ ID NO: 57407 - DNA, 1679 bp, Homo Sapiens
gaaaggcagggaggggaggttgtcccctgctgagaaccattggtttaaggttaatctggctctgctttcatagactactctgttacccaggctggagtgcggtgatgagtgatcatagctcactgcagccttaaactctagtgatcctcccgccttggccttccaaagtgctgagattacagatgtgaaccaccacacccagcccagtcaatttgtttttagaatgttcccaagaatatagttatgttgctaaataagatactaaaataatcccatactatatttcttgacagaaaaactattaaaatgtatacatgataaaaatttcttttatgaagcaaaatatgttttgttttgctcatgaacgtgaggtattttggaaaaatggtaaagaagtgcagagtcaagtcatagcgactaataatgggttattttcttaaattgtatgcttatgttaattctcacagtctttttgtttgggtctgtgacagatcttacaaaagatcttttagacctatgattcttaacaaaattaaagaattaagtcggaaccaattttccacaatgtctcatctaagaaaggactcacagcccagcagcccaggagatgacgcaatggacaggagtgggctccctgaccttcaaggaagatttgagctatctgggaaaaacagacagtatccactggatgcattggaaccccaacccagcattggggatattaaggacattaaaaaagcagccaagtctatgctagacccagcacataaatctcatttccaccctgtgaccccaagtttagtattcttgtgtttcatatttgatgggttacaccaggcattactgagtgttggtgtgagcaagaggtctaatactgtggttgggaatgagaacgaggaaaggggtactccttatgctagcagattcaaagatatgcctaactttattgcccttgagaagtcatcagttctccgccactgctgtgaccttttgataggcattgcggctggatcaagtgataagatttgcaccagcagtctccaagttcagagacgattcaaggcaatgatggcatctattggaagactttcacatggtgagagtgctgatctgctaatcagctgcaatgcagaatcagccataggttggatcagctcaagaccgtgggttggagaattaatgttcacacttctatttggagactttgaatcccctctacacaagctacgcaagtcaagttagttgccaagaaagcacagatgacaacctattaatgctgtgagaatgtttctagatcagtgcatggatggctccattgctctacgggccattgtgtctgagatcccagtctttgaggagaaaaaaaacaatggttaaaaaggcattggggaaatattttgagtttgggggtgtactttgccaccccattattggggagctgtcaccacgaatgttcccaaacttagcaacagcggcaaactactgggccaagatgagcaaccccacatttttgggatttaaagctcctgatgttataccaggatcaaccatcacactccctttgcttcaaatggcatctaccccgtaagatcttgaggggggagtgttgggtggaatcatagatccatgcactcctaacatgaactaattctcattatttaaaaaaaaaaaaaaaaaaa

SEQ ID NO: 57408 - DNA, 2516 bp, Homo Sapiens
cggggccggcggacccgcgggcaggcactgcccgggctggacgacgtctggccggctcccggcgaagggcagcggaggagcggcccagagcgcgcagctagggcactggcgaaaccccgggacagtccctctccgtgcgggggcggcgcagagcagtcccatccccggggtcccgggcgcggctgactgccggctggttccctgcgcgcagtagctccccgagccgggctgcaccggaggcggcgagatggtcgcgcgcgtcggcctcctgctgcgcgccctgcagctgctactgtggggccacctggacgcccagcccgcggagcgcggaggccaggagctgcgcaaggaggcggaggcattcctagagaagtacggatacctcaatgaacaggtccccaaagctcccacctccactcgattcagcgatgccatcagagcgtttcagtgggtgtcccagctacctgtcagcggcgtgttggaccgcgccaccctgcgccagatgactcgtccccgctgcggggttacagataccaacagttatgcggcctgggctgagaggatcagtgacttgtttgctagacaccggaccaaaatgaggcgtaagaaacgctttgcaaagcaaggtaacaaatggtacaagcagcacctctcctaccgcctggtgaactggcctgagcatctgccggagccggcagttcggggcgccgtgcgcgccgccttccagttgtggagcaacgtctcagcgctggagttctgggaggccccagccacaggccccgctgacatccggctcaccttcttccaaggggaccacaacgatgggctgggcaatgcctttgatggcccagggggcgccctggcgcacgccttcctgccccgccgcggcgaagcgcacttcgaccaagatgagcgctggtccctgagccgccgccgcgggcgcaacctgttcgtggtgctggcgcacgagatcggtcacacgcttggcctcacccactcgcccgcgccgcgcgcgctcatggcgccctactacaagaggctgggccgcgacgcgctgctcagctgggacgacgtgctggccgtgcagagcctgtatgggaagcccctagggggctcagtggccgtccagctcccaggaaagctgttcactgactttgagacctgggactcctacagcccccaaggaaggcgccctgaaacgcagggccctaaatactgccactcttccttcgatgccatcactgtagacaggcaacagcaactgtacatttttaaagggagccatttctgggaggtggcagctgatggcaacgtctcagagccccgtccactgcaggaaagatgggtcgggctgccccccaacattgaggctgcggcagtgtcattgaatgatggagatttctacttcttcaaagtgcaatccgtttgattgatatgaataccaaccatcgtgggctccagcttaaaggagagcagagggggtcgatgctggaggttccggggccccaagccagtgtggggtctcccacagctgtgccgggcagggggcctgccccgccatcctgacgccgccctcttcttccctcctctgcgccgcctcatcctcttcaagggtgcccgctactacgtgctggcccgagggggactgcaagtggagccctactacccccgaagtctgcaggactggggaggcatccctgaggaggtcagcggcgccctgccgaggcccgatggctccatcatcttcttccgagatgaccgctactggcgcctcgaccaggccaaactgcaggcaaccacctcgggccgctgggccaccgagctgccctggatgggctgctggcatgccaactcggggagcgccctgttctgaaggcacctcctcacctcagaaactggtggtgctctcagggcaaaatcatgttccccacccccggggcagaacccctcttagaagcctctgagtccctctgcagaagaccgggcagcaaagcctccatctggaagtctgtctgcctttgttccttgaagaatgcagcattgtctttgtctgtccccaccacatggaggtgggggtgggatcaatcttaggaaaagcaaaaaagggtcccagatcccttggccctttcctccgaggacttctatcctccccaggcctttgtttcttcggctaaaggtacagttcctttcaagaggtaacagcactgggatccaagcagggggatgaaaaactcagcagagaaattcgagaccattttgcaagactgtgcccttctcctcaggaccccctggctcagttcttgaaaaacggtgtcatatttagtcagaggccccacccccaggaagcatggatggggatgaaggcacaggcgtctccaacctcagaggccctttgtggggtcaggacacagagtgggagggagactgatgcaggcctaccagtccctggctttttgtctggggctggaataaagaggtgccttcagctggtgggccgagaggcaggaagcagcctt

SEQ ID NO: 57409 - DNA, 4860 bp, Homo Sapiens
cctgttagcgcacaggcacgggaggcttcttccggctcggccgtgctgctcagcgggtgtaaacagcctctgcggtgtaaacagcctctgcggtgtaaacagccgcggcgggcaggccaggactgtcagtgcccgcccctcggggcaggtaatttcatgctcccaaaatgggacataaagtggttgtcttcgacatttctgtcatcagagccttgtgggaaactcgtgtcaagaagcacaaagcttggcagaagaaggaggtggaaaggcttgagaagagcgccttggagaagataaaggaggagtggaactttgtggccgaatgcaggaggaagggcatcccccaggctgtatactgcaagaatggcttcatagacaccagcgtgcggcttctggacaagattgaaaggaacactctcacaaggcagagttcacttcccaaggacagaggcaaacggagcagtgcgtttgtgtttgaactttctggggagcactggacggagctcccagattcattgaaggagcagacacacctgagagaatggtacataagcaataccttgattcaaatcattcctacatatattcagttatttcaagagatgagaattctggatctgccaaaaaaccaaatctcacatcttccagcagaaatcggttgtttgaagaacctgaaagaactcaatgtgggtttcaactatctgaagagcattcctccagaattgggagattgtgaaaatctagagagactggattgttctggaaatctagaattaatggagctgccctttgaattaagtaatttgaagcaagttacatttgtagatatctcagcaaacaagttttccagtgtcccaatctgtgtcctgcggatgtcgaatttgcagtggttggatatcagcagcaataacctgaccgacctgccgcaagatatagacaggctagaggagctgcagagctttctcttgtataaaaacaagttgacctaccttccctattccatgctgaacctgaagaagctcactctgttagtcgtcagtggggaccatttggtggagctcccaactgccctttgtgactcatccacacctttaaaatttgtaagccttatggacaatcctattgataatgcccaatgtgaagatggcaatgaaataatggaaagtgaacgggatcgccaacattttgataaagaagttatgaaagcctatattgaagaccttaaagaaagagaatctgttcccagctataccaccaaagtgtcttttagccttcaactttgatatccatcagaagactgcaaatctcactattctctggagctatatataaatctttgttatgatcatgtcatataggaagaatggcttgtgcttaaggacaaagtctagaaaccactatcatagttgctaaaaaaaatggttttcaaatgtcaaatacatgagtatctccctccatggactggagaattgaaaaattggtttgtatattgatatttccaggttcatttgcatatacttttttccaaataatgcacatttaatatgttttaaaatgtcttatttttaagaattataactaaaagaccaaatactgaagttaagtgcattgttttcaggaatcaaaagataaaggggccgggtgtggtggctcacacctgtaatcccagcactttgggaggccgaagtgggtggatcacctgaggtccggagttcgaggctggtttggccagcatggcgaaaccccatctctactaaaaatacaaaaaattagctgggcatggtggcagttgcctgtaatcctagctactcaggaggctgaggcaggagaatcgcttgaacctgggaggtggagttgcagtgagccgagatcatgggactgcactccagcctgggtgacagagccagactctgtctcaaaaaaaaaaaaaaagaaaagaaaaagataaagggattgtgaaaagagcatttatattggactaatcagatgagagtgttttgttattttgaaagagtttcttttactgagaataatcttccttgagtttatataaactgctatttccatatgttttaagttatattttggcaagtgtagactcccaggagagacttgtaggtacaatctaggccttgaagaaacaaaggctggaatatctgcccatgctttgggcatgagatgctcagatggtgcgtgggtagatctagttgaggaagtgtgggcctggctgttcatgggaagtcttcagtggccttcatggatggccatccagtcctgagtggtcaccctgggggtcctgggacacacctcagtaaagagcaaaggcaacgccctcagggtcccttcctccaagatggccatgtagggtaatggagatgaccagtccacactgataaggagttcctagcaaggcttccttgtgggtaccacaggacaactctgcccatagcaaagatgcttcagtccagagggagcccatgggctgtttgaatttgggagaggtgggattcattacaagactttgggctcttatgtcacatcacatgatttggagaaattagacacaatctcttatttttataccactgtcttgggctaaaataaacaggttgtggctgatggtgttgaagataaataagcttaaacaaataactttggccgggcacggtggctcacacctataatcccagcactatgggaggctgaggcaagcaggttgtttgagcccaggaatttgagaacaggattttgagaacagcttggacatcatgacgaaaccccatctccacaaaaaaattcaaaaaattagccaggtgtggtggcatgtgcctgtggtcccagctactcaggaggctgaggtgggaaaatcacttgagcccaggaggtcgaggctgcagtgtgctgtgattgtgacactgccctccagcctgggtgacagagtgagaccctgtctcaaaagcaaaacaaacagcaataacaatattattattgttataactaaaaaaaaaaaaacaaaaacaagcagcttttgtgactaagaaggaaaatatgcatatagtggcatatttttatatgaatcatctcctctgtggtcttgcccagtaccatccagtggagctttctgcagtgacggaaatgttctgtatttgcgttgtccaacgtggtaaaccagacacatgtgattcttgagcacttgaacaatgactgatgtgattgaagaacccatctttcaattcaattaaatttaaatagccacatttaactccagccttgggtttgacctgatggaaaattcccatgagagagtgctccaaaccgttccaaggtggggccagttgcgattctaaaggaagaagcactaaatggcagggtgatcagtccaaagcatttatgaggggagcttacatacagcatgggctgcagcgtccttgtgatgggcagtgagacaagggatgttctacctgggcatgtccccagcgagggggttgggggatggagttcacatgaagatgtaaggaatttgggtgggggctgggctggcttctacatgtttagcaacacggctgatctttcagtgtttccagcaacaacctaagcaccgttatcagtgcctaggaatgttcaaggcccaggctggggttcagacctgcagaggaaaacatcagctggctgggtcaaggcaccatgtgttacttggtcaggacagagacaaaaatgaggaaaactaggggaccccacacacatgtggctaccatactcctgaacaggtctagctagttatttgtttttttggaagttaatctggggtagaaatgtatggtgatttttattttctctgtctgaagaaccagccatttttaaaaaggttattattgacatcccaatattttgtcttggtgggcttactcataagtccaaacattttattctcaacaggtgtaaaacaggcagagcattctaaaaccacatggtagtgctttggtggaggactgcttccacttagaaacaaactctgagaagtaggctaagagaagacaagagggccgggcgcggtgactcacgcctataatcccagcactttgggaggccgagatgggtgaatcatgaggtcaggagttcgagaccagcctaaacaacatagtgaaaccctgtctctattaaaaatgcaaaaaattagccgggcgtggtgggcacccgtaatcccagctactcaggaggctgaggcaggagaattgcttgaacccaggaagcagaggttgcagtaagctgagatcccaccattgcactccagcctgggcaacagagtgagactccatctcaaaaaaaaaaagagagagagatgaaaagagtaggaaaatgagaaatcaccttcgttgaatcttaaatagttacatttttttctttttaacactaaaaatacaattcaaatttattagctctactacttgaatgattttggaattttatgtcatgctaaggtatgtgttacatatggccaagtggaaaatatatctgaagaggggctttcatacaaatagactgttcataatttatgtaaattttattttaataaaatcagttttttgtttaaaaaccttgtttcactgtcacatatgaaaaaaatactgcattgatatataattatttcatgttacataataacccaaaacaaataattacttgaatatgtttgtagagatactatttaatttattcatataaatgtgcagaaagattccaaaggagaatatatatcttgtgaaaatatggagatttgaaaatttgacatgatgcaaatagactgatacataatttggaaaggttctttacatggcagaatacatgtatgaatattaaagt

SEQ ID NO: 57410 - DNA, 2767 bp, Homo Sapiens
tcatttgtaggctgaactaatgactgccgccataagaagacagagagaactgagtatcctcccaaaggtgacactggaagcaatgaacaccacagtgatgcaaggcttcaacagatctgagcggtgccccagagacactcggatagtacagctggtattcccagccctctacacagtggttttcttgaccggcatcctgctgaatactttggctctgtgggtgtttgttcacatccccagctcctccaccttcatcatctacctcaaaaacactttggtggccgacttgataatgacactcatgcttcctttcaaaatcctctctgactcacacctggcaccctggcagctcagagcttttgtgtgtcgtttttcttcggtgatattttatgagaccatgtatgtgggcatcgtgctgttagggctcatagcctttgacagattcctcaagatcatcagacctttgagaaatatttttctaaaaaaacctgtttttgcaaaaacggtctcaatcttcatctggttctttttgttcttcatctccctgccaaatacgatcttgagcaacaaggaagcaacaccatcgtctgtgaaaaagtgtgcttccttaaaggggcctctggggctgaaatggcatcaaatggtaaataacatatgccagtttattttctggactgtttttatcctaatgcttgtgttttatgtggttattgcaaaaaaagtatatgattcttatagaaagtccaaaagtaaggacagaaaaaacaacaaaaagctggaaggcaaagtatttgttgtcgtggctgtcttctttgtgtgttttgctccatttcattttgccagagttccatatactcacagtcaaaccaacaataagactgactgtagactgcaaaatcaactgtttattgctaaagaaacaactctctttttggcagcaactaacatttgtatggatcccttaatatacatattcttatgtaaaaaattcacagaaaagctaccatgtatgcaagggagaaagaccacagcatcaagccaagaaaatcatagcagtcagacagacaacataaccttaggctgacaactgtacatagggttaacttctatttattgatgagacttccgtagataatgtggaaatcaaatttaaccaagaaaaaaagattggaacaaatgctctcttacattttattatcctcgtgtacagaaaagattatataaaatttaaatccacatagatctattcataagctgaatgaaccattactaagagaatgcaacaggatacaaatggccactagaggtcattatttctttctttctttttttttttttttaatttcaagagcatttcactttaacattttggaaaagactaaggagaaacgtatatccctacaaacctcccctccaaacaccttctcacattcttttccacaattcacataacactactgcttttgtgccccttaaatgtagatatgtgctgaaagaaaaaaaaaacgcccaactcttgaagtccattgctgaaaactgcagccaggggttgaaagggatgcagacttgaagagtctgaggaactgaagtgggtcagcaagacctctgaaatcctgggtaaaggattttctccttacaattacaaacagcctctttcacattacaataatataccataggaggcacaagcaccattattaagccactttgcttacaccttaagtgtgtacaattcaagtgtgagaatgctgtgttaactattctttggaattctccttctgtccagcaaatactctaatgatggttaaacatggcacctactcagcaatgccttcctggaccacaacccctatccccctgccccaccctcctcattaaaaacaaatacttctactgtttgggtgtgtgatagggttctcaatgcagatctcccttttctagttagctatattcttgactgcatccgctaaaaatgttaaagcttcttgagagacagacatgccagattttcttggtatctcccataatacgacctacagtccatggtctacagatgttttaaatagaattgctattctcgatacatacaaagacgtaattgctgacccacaatcagtaacatccatattgagagatttttcaaaggatggtgaccctgcttgtatttatttaccttggtattttttcttgcatccttctgtgattcaaaaaagtaaaatgtggctttctgaaatgatggataagagtctacatcttctagaaaaaatacataaaggagtagttaagctctgtaaatgtgccacgagctccaacacgaccatcgtagggtgaagcccacgttttcttccatggcctcaaaggccctagaacttgcctacctttctggccttacctcctagctacttatccatctcttgaactttatactcttgtataaatttctaactttcagaaaatgccatactctgttttggcaccacacatgtatatttccccctggtacacttggaagactcttatccatctgtgaaaccctatgttgtcatcacttggtccatgaaatattacctggccaatatcccaccatcacctcaaacccaatcaccccctcctctgtatgctgtcacacctatattattaaacttatcacattgcattgtaattacttcctgacctttgtatctactcttttagtaactgatgtatatatctgaaaggagagattgtttcattgtgcaatcaataaatgtttgataaaataaagccc

SEQ ID NO: 57411 - DNA, 3581 bp, Homo Sapiens
gggggcggcggcggctggagagggtcctcggcagcctctgaggagcgcggggcgcggccatgagcgagtccagcggcagtgcgctccagcccggcaggcccagccggcagcaggcggtccatccagagaacctctctctagactccagttgcttctcttctccacctgtgaacttcctccaagaattgccaagctaccggtccattgcacgtaggagaacgactgtccattcccgggacaagcaaagcggaactttgctaaagccaaccgactcttacagctcccagctggaggacagaatcgctgaaaacctcagcagccattctcttcgaaattatgcactgaacatctctgagaagcggagactaagggacattcaagagacacaaatgaagtatctctccgaatgggaccagtggaagcggtatagcagcaagtcttggaagaggttcctagagaaggctcgagagatgacgacccacctggagctgtggcgggaggacatccgcagcatagaagggaaatttggcactgggattcagtcctatttctccttcttgagattcctggtgttgctgaatttggtgatatttctgatcatctttatgctggttttgctcccagtcttactcacgaaatacaagatcaccaacagcagcttcgtgctcattcctttcaaagacatggataaacaatgtacagtctatccagtaagcagttctggactcatttacttttacagttatatcatagacttgctttctggcactggtttcctggaggaaactagcctcttttacggacattacaccattgatgaggtgaaatttcagaacttcacctatgatctgcccctggcgtatttgttaagcacaatcgcctccctggccctgagccttctttggatagtgaaaaggtcggtggaaggattcaaaatcaacctgattcggagtgaggagcactttcagagttactgcaacaagatatttgccggctgggacttctgcatcactaaccgcagcatggcggatctgaagcacagcagcttgcggtacgagctccgagcagatctggaggaagaaagaatgcggcagaaaatagcagaaaggacctcagaagaaacaatacgcatttactctttgagactgtttttgaactgtattgttctggctgttttaggggcatgcttttatgcaatatacgtagcaactgtcttctcgcaagagcacatgaaaaaggaaatcgacaagatggtttttggagagaacctcttcatattgtatctaccgtctattgtgatcacgctggccaattttatcaccccaatgatctttgccaagatcatccgctatgaggattattctccaggctttgagatccgtctgacaatccttaggtgtgtctttatgcggctggccaccatatgtgtcctggtgttcacgctgggctccaagatcacatcctgtgatgatgacacatgtgacctttgcggctacaaccagaaactctacccgtgctgggagacccaagttgggcaggaaatgtacaagctgatgatcttcgacttcatcatcatcttggctgtgacactcttcgtggattttcctagaaagctcctggtgacctactgttcctcttgcaagctgattcagtgctgggggcagcaggagtttgccattcctgataacgtcctggggatagtttacgggcaaaccatctgctggatcggagcctttttctcaccccttctccctgcaattgcaaccctgaaattcattatcatcttctatgtgaaagagtggagtctgctttacacctgcagaccctcccccaggccgttcagagcatccaattctaatttcttcttcctgttggtgttgttgatcgggctgtgtttggcaataatacctctgacaatcagcatatcacgcatcccttcctcgaaagcctgtgggccgttcaccaacttcaacaccacctgggaggtcatccccaagacagtgagcaccttccccagctcgctgcagtccttcatccatggtgtcacatccgaagcctttgcagttcctttcttcatgattatttgcctcatcatgttttacttcattgccttagctggagcacacaaacgggtggtcatccagctccgagagcagctatccctggaaagtcgtgacaagtgctacctaatccagaaactaacagaagcccaaagggacatgaggaactaactagactgagcgtgaagatggtgctgcctgttgcttctaagctgacctagtgattctgctgagcctacagagtctacctgggttttgagtggacatttaaaaatatatttttcttgagtttaggcttttccatatgtgcagctgtgtttacctaacccagcccttaattagggcttcagtgacttagaaaagcaggggaaacccaaggctttgcctgcagaccggccacactgtgacaactctaccaaaaaccaacaagccattcaagcttttacaagaatgaaagagcggagacggtagtttagtatttgagccacgagtttatgtgcacaagtgttttgggttgtggactgaagctcagcctgttaatcagaccagcccatgagtgtataacaaacagaattggaggctggtttcttaaacacacacgtccacattttttagggttgttttcctgtgcttacaatttttaatgcatgtgcctttatttcacaaaacatgtggctgggcgcagcggctcacgcctgttatcccaacactttgggaggccgaggcaggcggagcacctaagttggggagttcaagacctgcctgaccaacgtggagaaactccgtctccactaaaatacaaaattagctgggtgtggtggcacatgcctgtaatatcagctactcaggaggctgaggcaggagaattgcttgaacccaggaggtggagtttgcagtgagctgagatcacaccattgcactccagcctgggcaaaaagagcaaaactctccctaaaaaaaaaatgtagaatatctcttaagatttccgttatggtaaaaaccatatgcaataaatacctcattgtaagcttacccaaaattgatagatgtcaaccttttaacagaagaacagaagtttaagttattgtttaatgtaatcagttttcattttaatatctttgaaatctttttcaaaggactgtagttttgtaatggacttttcaagccttccttccattgtttttcttccgttcactggctccacacgtttcctggggagtagcctggaatttaaagttgggtgcaggttttagaaagctgttgctgttaacaataattctcccggccatctccactccactactcaaaaatgcctgaatccttgctcagaggagcaaaggtatcttctcgtccctttcttacagccattttcttgcttttccacaaagatattatttaaagtggaatatttttgtaactgggataccaatgagcttttcggtcttttcctgacttggtaaggtttatgggtttctaaatctaataactacagtcataccaccccgaaaaaaaaaaaaaaaa

SEQ ID NO: 57412 - DNA, 3744 bp, Homo Sapiens; identical to SEQ ID NO: 30413

SEQ ID NO: 57413 - DNA, 1584 bp, Homo Sapiens
gaacatgacggcgccctgggtggccctcgccctcctctggggatcgctgtggcccggctctgggcgtggggaggctgagacacgggagtgcatctactacaacgccaactgggagctggagcgcaccaaccagagcggcctggagcgctgcgaaggcgagcaggacaagcggctgcactgctacgcctcctgggccaacagctctggcaccatcgagctcgtgaagaagggctgctggctagatgacttcaactgctacgataggcaggagtgtgtggccactgaggagaacccccaggtgtacttctgctgctgtgaaggcaacttctgcaacgagcgcttcactcatttgccagaggctgggggcccggaagtcacgtacgagccacccccgacagcccccaccctgctcacggtgctggcctactcactgctgcccatcgggggcctttccctcatcgtcctgctggccttttggatgtaccggcatcgcaagcccccctacggtcatgtggacatccatgaggaccctgggcctccaccaccatcccctctggtgggcctgaagccactgcagctgctggagatcaaggctcgggggcgctttggctgtgtctggaaggcccagctcatgaatgactttgtagctgtcaagatcttcccactccaggacaagcagtcgtggcagagtgaacgggagatcttcagcacacctggcatgaagcacgagaacctgctacagttcattgctgccgagaagcgaggctccaacctcgaagtagagctgtggctcatcacggccttccatgacaagggctccctcacggattacctcaaggggaacatcatcacatggaacgaactgtgtcatgtagcagagacgatgtcacgaggcctctcatacctgcatgaggatgtgccctggtgccgtggcgagggccacaagccgtctattgcccacagggactttaaaagtaagaatgtattgctgaagagcgacctcacagccgtgctggctgactttggcttggctgttcgatttgagccagggaaacctccaggggacacccacggacaggtaggcacgagacggtacatggctcctgaggtgctcgagggagccatcaacttccagagagatgccttcctgcgcattgacatgtatgccatggggttggtgctgtgggagcttgtgtctcgctgcaaggctgcagacggacccgtggatgagtacatgctgccctttgaggaagagattggccagcacccttcgttggaggagctgcaggaggtggtggtgcacaagaagatgaggcccaccattaaagatcactggttgaaacacccgggcctggcccagctttgtgtgaccatcgaggagtgctgggaccatgatgcagaggctcgcttgtccgcgggctgtgtggaggagcgggtgtccctgattcggaggtcggtcaacggcactacctcggactgtctcgtttccctggtgacctctgtcaccaatgtggacctgccccctaaagagtcaagcatctaagcccaggacatgagtgtctctccagactcagtggatctgaa

SEQ ID NO: 57414 - DNA, 4033 bp, Homo Sapiens; identical to SEQ ID NO: 31672

SEQ ID NO: 57415 - DNA, 4235 bp, Homo Sapiens; identical to SEQ ID NO: 23099

SEQ ID NO: 57416 - DNA, 2882 bp, Homo Sapiens
aagcgcctcgcgggggtctggcccggagtggagggcgcgcggtcccagccctcccgctcggccggcgggtgtcgagttcagccctaggggacctctttctcctggacattgaagatatggccctttggaggtgacccaggagagaagggatgaaggcctttggtcctccacatgagggccccctccaaggactcgtggcctcccgcattgagacttatgggggccggcatcgagcctctgctcagagcactactggcagactctatccccgaggataccctgtgctggatcccagtcgccgacgcctccagcagtatgtcccctttgccaggggttctggccaggcccgaggcctgtcacccatgagactgcgagatccagagcccgagaagaggcacgggggccatgtgggggctggcctgcttcactcccccaaactcaaggaactcaccaaggcccatgagctggaggtgaggctgcacactttcagcatgtttgggatgccccggctgccccctgaggaccggcggcactgggagataggagagggtggcgacagtggcctgaccatcgagaagtcctggagggagctggtgcctgggcacaaggagatgagccaggagctctgccaccaacaggaggccctgtgggagctcctgaccaccgagctgatctacgtgagaaagctcaagatcatgactgatctgctagccgccggcctgctgaacctgcagcgagtgggactgctgatggaagtgtcagctgagaccctgtttggaaatgtccccagcctgattcgaacccaccggagcttttgggatgaggtgctggggcccaccctggaggagactcgggcctcgggccagcctctggaccccattggtctgcaaagtggcttcctgacgtttggccagcggttccacccctatgtccagtactgcctccgagtgaagcagaccatggcttacgcccgagaacagcaagaaactaaccctctcttccatgccttcgtgcagtggtgtgagaagcacaagcgctctgggaggcagatgctctgtgacttgcttatcaagccccaccagcgcatcaccaagtacccactgctgctccatgctgtgctcaagaggagccccgaggcacgagcccaagaggccctgaatgccatgattgaagccgtggagtcattcctgcgacatatcaatgggcaggtccgccagggcgaagagcaagagagcttggcggctgcagcacaacgcatcgggccctacgaggtgctggagccacccagtgatgaggtggagaagaacctgcgcccattctccaccctggacctgacgtcccccatgctgggggttgcatctgagcacaccagacagctgctgctggaggggcctgtgcgagtgaaggagggacgagaagggaagctggacgtgtacctgttcctcttctctgatgtgctccttgtgaccaagccccagcgcaaggcggacaaagccaaggtcatccgaccccctctcatgctggataagctcgtgtgccaacccctgcgagaccccaacagcttcctgctgatccacctcactgaattccagtgtgtctccagcgccctccttgtgcactgtcccagtcctacagaccgtgcccagtggctggagaagacccagcaggcccaggccgccctacagaagctgaaggcagaggagtatgttcaacagaagagggagctcctgaccctctatcgggaccaggacagggagtcccccagcaccaggccctccacgccttccctggagggctctcagagcagcgcagaggggaggactcctgagttctcgaccattatcccccacctggtggtgacagaagacacagatgaagatgctccccttgtgccagatgatacctcagactctggctacggcactttgatcccaggcacccccacggggtcccgctccccactgagccgtctacgccaaagagcccttcggcgggaccctcgcctcaccttctccaccctggaactccgggacatccctctgcgtccccaccctcccgacccccaagctccccaacgccgaagcgcccccgaactgccggaaggaatcctaaaaggaggcagtcttccccaggaagacccaccaacctggtctgaggaagaagatggggcctccgagcgagggaatgtggtggtggaaacactccacagggcccggcttcggggccagcttccctcctccccaacccatgctgactctgccggggaaagcccctgggagtcctcaggggaggaggaagaagaggggcctctgttcctgaaagctggccacacatccctgcgcccaatgcgggctgaggacatgctcagagagatccgggaggagctggccagccaaaggattgagggggccgaggagccccgggacagcaggccacggaagctgactcgggcccagctgcagaggatgcgggggccccacatcattcagctggacacccctctgtccgcatcagaggtatgaggaatgcagaggacctttggcatgcatctctcccagaggagatctctccccagtagtgctggtcaccctccggcatctgtgactctacctcaaggaccacatttcccaaaggaagcctggcccaggcaccctgcctcctgctctgtttggggatcaagaactgtaaatttatgtatcataggtgcacctgagccccacagaaagttgtgcataaaaatgactgccctggctgggcatggctgcctgtaatcccagcactttgggaggctgaggtgggaggatcccttgagcccaggagttccagaccagcctgggcaatatagggaaaccctgtctttacaaaaaaaaattttaaaaatt

SEQ ID NO: 57417 - DNA, 5968 bp, Homo Sapiens; identical to SEQ ID NO: 30435

SEQ ID NO: 57418 - DNA, 1828 bp, Homo Sapiens
acttccttcgtctgggtggttgccccagcgacacgttgggccgaagagcggtgttgggtacccgagagacccggcggtggggaagtcacttcctcccgaagacgctgtttcctagcaaccgccctccgcctctgttattagcccctcctcctcgctcggtccaggaccggctctgcgggcgccgccaggcccagaccaagctactatcagaagttgaattctaataattagctattttataaaggtaacgagaaaaaatacactatgtctgatgaagtttttagcaccactttggcatatacaaagagtccaaaagttaccaaaagaactactttccaggatgagctaataagagcaattacagctcgctcagccagacaaaggagttctgaatactcagatgactttgacagtgatgagattgtttctttaggtgatttttctgacacttcagcagatgaaaattcagttaataaaaaaatgaatgactttcatatatcagatgatgaagaaaagaatccttcaaaactattgtttttgaaaaccaataaatcaaacggtaacataaccaaagatgagccagtgtgtgccatcaaaaatgaagaggaaatggcacctgatgggtgtgaagacattgttgtaaaatctttctctgaatctcaaaataaggatgaggaatttgaaaaagacaaaataaaaatgaaacctaaacccagaattctttcaattaaaagcacatcttcagcagaaaacaacagccttgacacagatgatcactttaaaccatcaccttggccaaggagtatgttaaaaaagaaaagtcacatggaggagaaggatggactagaagataaagaaactgccctcagtgaagaattggagttacattctgcaccttcttcccttccaacgccgaatggcatacaattagaagctgagaaaaaagcattctctgaaaaccttgatcctgaggattcatgcttaacaagtctagcatcatcatcacttaaacaaattcttggagattctttttcaccaggatctgagggaaacgcatctggaaaagatccaaatgaagaaatcactgaaaaccataattccttgaaatcagatgaaaataaagagaattcattttcagcagaccatgtgactactgcagttgagaaatccaaggaaagtcaagtgactgctgatgaccttgaagaagaaaaggcaaaagcggaactgattatggatgatgacagaacagttgatccactactatctaaatctcagagtatcttaatatctaccagtgcaacagcatcttcaaagaaaacaattgaagatagaaatataaagaataaaaagtcaacaaataatagagcatccagtgcatctgccaggagtggttagaaaagaaaaatgtatatttacatgaaatgcacagaataaaaagaattgaaagtgaaaacttaaggatccaaaatgaacagaaaaaagctgctaaaagagaagaagcattagcatcatttgaggcctggaaggctatgaaagaaaaggaagcaaagaaaatagctgccaaaaagaggcttgaagaaaaaaacaagaagaaaactgaagaagaaaatgctgcaagaaaaggagaagcactacaagcttttgaaaaatggaaagagaaaaagatggaatatcttaaagagaaaaatagaaaggagagagaatatgaaagagcaaagaaacagaaagaggaggaaactgttgccgagaaaaagaaagataatttaactgctgttgagaaatggaatgaaaaaaaggaagcttttttcaagcaaaaaaaaaaaaaaaa

SEQ ID NO: 57419 - DNA, 1431 bp, Homo Sapiens
ccgggaaacctgccattcttcgctgctgatcgcgggattctttttggatagggttgacgttcgtggatagactcatatctgtgaccagtgtccgccaccgcggatggcaagagacctgatcggaccggccctgccgcccggcttcaaggcccgcggaacagcggaggacgaagagcgggacccgagccctgttgcaggaccagctctgccccctaattataaaagcagtagttcagattcatcagacagcgatgaagacagtagttctttgtacgaagaaggaaatcaagaatctgaagaagatgacagtggtccaactgcaagaaaacagaggaaaaatcaggatgatgacgatgatgatgatgatgggttttttggaccagcccttcctcctggatttaaaaagcaggatgattctcctccaaggcccataataggtcctgcattgccacctggtttcattaaatctacacagaaaagtgacaagggcagagatgatccaggacaacaggaaacagacagcagtgaagatgaggatattattggaccaatgcctgcaaaaggaccagttaactataatgtaacgacagagtttgaaaaaagggcccagagaatgaaagaaaaactgaccaaaggagatgatgattcatctaaacccattgtaagagagtcatggatgactgaacttcctccagaaatgaaagactttggtcttgggccaaggacttttaagagaagagctgatgacacatctggagatcgatcaatctggacagatactccagctgatagggaaaggaaagctaaggaaacacaagaagcaaggaagtcatccagtaagaaagatgaagaacatatattatcaggaagagataagagactggctgagcaggtatcttcatacaatgaatcaaaaagatcagaatctcttatggacatacatcataaaaagttaaagagtaaggctgctgaagacaaaaataagcctcaagagagaataccatttgaccgtgataaagatctcaaggttaatcggtttgatgaagctcagaaaaaagccctaataaaaaaatctagagaactaaacaccagattttcacacggcaaaggcaatatgtttttataagtaagtatatttcagtgaggtatattttaatactgatcaatgtgaacttttctaaatactctattgtctttaataattgtgctgaaatctatttccttttataatagattaaaaattttatatttttataagtaaacagtgatttttgaaaagtcagccttgtgggatgaaaaatatgtcttactggaaaaatccctcataataacctaatagggcattgctattaaaaatgctaaaataaaaattcagcttatgagaaatggcaaaaaaaaaaaaaaaaaaaaaaaaaaaaaaaaaaaaaaaaa

SEQ ID NO: 57420 - DNA, 3178 bp, Homo Sapiens
ggggctcgacggtggccgacgtgggacagtctggctgtggcaggggtctcggaaaccatgggttattgcagtggcaggtgcacgcttatctttatctgtggcatgcaactggtactgaagatggatggggatcattaggtttctcttattatattgtcccacaaatatcttaaccgtttgtgtgctggagaggcaaatatttgacttccttggatatcagtgggcacctatcctggcaaattttgtacatattattatcgtcattcttggtttgtttggaactattcaatatagacctcgttacataacaggatatgctgtctggctagtcctctgggttacgtggaatgtgtttgttatctgcttctatttggaggctggggacctctcaaaggaaacagaccttatcctgacttttaatatatcaatgcaccgatcttggtggatggagaatggaccaggatgtacggtgacgtcagtgacacctgccccagactgggccccagaagaccatcgctacatcacggtctcagggtgtttgctggagtaccagtacatagaagtggctcatagttccctccagattgtcctcgcactggcaggtttcatctacgcctgttatgttgtgaaatgtataactgaagaagaggacagctttgatttcataggtggctttgactcttatggctatcaagggcctcagaagacatctcatttacaactacagcctatgtacatgtcaaaataatacagatgacttcagtatgtcagcccatggacctttcaaagaacttttttcgcagtggcctcctgcatttcatgaagagcaagaagcaactgagtttaaatacatacacgtattaacaaaacaaatgcaaagcctctacatacaacactgacacacacacacacacacacgtgagcacgcacacaccaattccacttgacctcctctttctaactgaaacagacaaatatgcaggacacgcccatcttggatttcctgaaagcaggcccctttctcccaggccttcggaaagttcagaaggagatgtgttgatgcccaacggttgccggccattgctaactcctctgcagcccagcgggttggcctctgtgagctgggaagtcatccaaggcacattagtttgagagctctgtcttctgcactccatacatcttgacagcaccacggctacttaggcaatgtaattgcaaaaacaaacgaaacatgccatgatgaccttgtacccgaagtccgaaatggcagattgtttgccctaaaggctgtaccgtacatacttgccttaacccacctacattgtgtgcccaagaatcccagtgcagacagccccaagccacttcctttaggctaacacactgctattaattctaaatgagttcaagcctgtgtgtttcatgtcaaggaacaagactgaatagctcagcagctccagtgtgtctgtataagaaaagtgccagctgtcagcaaagtgctttaccatagagcctccatggtggcccaaaagagacaagtaacaataacaatatctgtcatctttataattctaaaatatggtcttctgatggggttgggggtgggacagagtaaaacattaatctactaaactcactaatctactggaagcagaaagcagaaatggcttaactcgctgattttatttattgcactctaggtgcttttataagtatctacaattgtcttttactaacacagaaacagctgtggatttctatcaacagaggccaactgaatatgtattagctatgtttactcttttatatctaattcaaattgaagactctacgtaggtgaacttttttttctaacttcagtgtacaagattatttttgggtgggtggggggagcaatagttaccttggtgaaatatttgagatctttttgtggtatttgggggatctgttgtgtgttagagtgtatttcaaccctcctgtattattgtggcagaaaaactgtgctgttaacgtagttggcaacaagatgcctttggaaacttaatagtaggtcaatgtgtttatggaatattctgaactcctaggaaattttgttctatattttaaagcattatttggttttcattagtggaaaacataattagctcaggcttatcaggaactcagatgagtcatattttttcttggatacacctgagacattaaactcaattttttaaaactaacacaccattctttagtgcagtgaaattcaaaagttataaattggcatggagcaagttttttctttgatttctatgaagtttcagttattggattaaactactttagaccttagcccattcggatctacatacaccagttccattactgtgtttgcatggatgtctgtaatatacacacacatatacatttgaaaatgatagaggaacaaagagttatcattggaacataaactataaaaaaagattccagcactcatgcttgaatttcctcagtgggttgtatgtttgtccatacatacatgtataaaataaacaattgcaaacatgtcagtgaaacctcatatgacgcttttatagtgacatgcatgtttaatgtatgagaaaaatatttaccaatgtattgtcctttgagtcctaaaatataaatactatacatgccagaaactattctaatgtgacttttaatgtgactattaaaaatgaggtttcactgtacattcatgctgtgatgcgatttcaccttatagtacatgtatatgggtacagaaaataaaccctcatattcctgctttaagttacagccaagttttcaccaaatcacaactatcatcaccaccaaaattttaaaaaacagtagttgactactaaaaagtaatcagtggacaggtcatttatgggatcagtaagcacagtagtgtgattatatctgggaaaacatctacagttgtacagctgtatcctcctcaaaatccggtgaagaatgctatttttctaggctgagcttttgttataaacttaatattcagaaggcaagggttatgatcctgatgtgtcctttttttttgcatttgttaattctgaatgtatttttaacagaatgatttttttgacttactagtgtaatttgcattttaaaaataaatggaaaaatacttaaaagaaaaaaaaaaaaaaaa

SEQ ID NO: 57421 - DNA, 1677 bp, Homo Sapiens
atttcctcgaaattagattcagcttatgcattttttggaaggaataccacagaagtgatgttgttttctttctgttgcatccaatcagatgatacaggattttgatttgttccattactgttgacatgaattttgaacatttgataatgccagtatcagccagatttttccattgtaaagtcattcctttgtcctttgtatttaataagtatgtttagggactttgagactatgtcaatgtcctgttcttcatcaaaattccactcactcattcttagtattcattgacgtttactgatcggactaattattattatgatagttgccaaatgtgggtttttctaattcaatcatttctttagtgtttattagcattctactataaggaaaagcactatcttctccccatttattaattcacatatttacatcagcttggagttattgatttctattttattaaatagtttataattgattaccatccttatttattttaatgctcaaattgtcccaaattatggccaaagaaagctccttcaaactggttgctatgtccttttgacatggcccatcattctttaaacacattttacatctggcacaataacgtgctacatacccatcttgtatttttcctgccccatcttttaaatcagccattctcaaggggttccttcttaatctggctgttgttgtgttggaactcctggtaccatcttagaaccttaaggagacaagcgaaccaagccaataagctttccatgatgctgcttagagttaaacagagcccaggtactaagttatgtcatggagacagtgaactaacctctggactgcttgctacatgagacaattgattttcttattttctatgtagggtggtacatttcctcattttgagatatttcttcaacatatagcttttcattagtggggattttgtcaattataaccaaaaacaatgtgacggatacccaagatgtttcatgttgtagcttgggtgaattacacttcctagtttatttggatttaagttgacaaataaaaattgcatatgtttatggtctataacatggtgtttcaatatatgtatacatcgtggaatggctaaatcaagctaacatatccattacctcacatagttattttttgtggtgagaacattttaaaaatattgtcttagcaattttcaatcaagcctgtcccatggagacacaacgcaatagtgacatgagcacttgactcgctgggttatcaggctttggctccaaatgtttggcttcaaatatgaaaaaattacatgaaagatgaaactatgcaatggcatggctgttggtcattcacatctctctctgccaagaatggagatgacgctgttgaaggaagaaatgtgttttctcctttttctcaagtgatatttgccttaggtcagattctactagtttaaagcaaaacgatctcctggtctgattcctttgggtctctaataatggaaactgcaaggatcagcataaagtgttcctttgttctgacgttggtataacattgcttgaaaaatgaaagtatttggacatgcagacagaagcaatattattcaggtcttccttgttgcaagtgagggaaatccaattaaaactggtttaaacctaaaaaaaaaaaaaaaaaaaaaaaaaa

SEQ ID NO: 57422 - DNA, 3584 bp, Homo Sapiens; identical to SEQ ID NO: 30801

SEQ ID NO: 57423 - DNA, 1311 bp, Homo Sapiens
cagcgccccgcaccgttgccgtagcagcagaacgcgagctcttgtggaggagcagggccggcgcgaggcgagactcgggagcgtgagcggggcccctggggcgccgccgtccttcttcgccccggcgccgggggctgtagccctggtccccgctcctctgtcgggccagtctgcaggcggagagagtcggacggcgcccggagcgcggatctcgccttgtggaggacagcgcgtcggctgcggttctctctcgaccccttctgcccggcgcttcggcccgggccgctcaggtgcagagcatgaataatctttcatttagtgagctatgttgcctcttctgctgtccacctttgtcaggggagattgcttcaaaattagcgtttttgccacctgatccaacttacacactgatgtgtgatgaaagccggacgcgttggactttacatctgtctgaacgagcagactggcagtattcttctagagaaaaagatgctattgagtgtttcatgactagaaccagtaaaggcaacagaattgcttgtatgtttgtacgttgttcacccaatgcgaaatacactttactcttctcacatggaaatgctgttgatcttggtcaaatgagcagcttttacataggactaggatcacggattaattgtaatatattctcatatgattattctggatatggtgccagttccgggaaacccacagagaagaacctctatgcagacattgaagctgcttggcttgctcttaggacaagatatggcattcgccctgaaaatgtgattatatatggccaaagtatagggacagtaccgtctgtggatcttgctgctcgatatgagagtgctgctgttattcttcattctcctctgacttcgggaatgcgagttgcctttcctgataccaaggagacctactgttttgatgcattcccaaacattgacaaaatctctaagataacctctccagtattaataattcatgggactgaagatgaagtcattgacttttcacatggcctcgcattgtttgaacgttgccaaagacctgtggagcctctctgggttgaaggagcaggtcacaatgatgtggaactttatggacagtatcttgaaaggttgaaacagtttgtgtcacaggaactggtgcagaaacataaagaagggaagtgattttctcaaggtctacagttttcaatgacggtactatgtattccattatcttctctttaccaaacttaactggattaatataccaatgatcctttcaaattatatgacataaacttatttgctctccaaa

SEQ ID NO: 57424 - DNA, 1830 bp, Homo Sapiens
agctgagagcccaatcgcatcaggggagcacggcccagcagcaggagctccaggctggctggacacctgggtccccacgcagactgtgagtagagggagctggaccacagtgggacaaggacacctccagacaggttgccagggccccacatggaggaggcaggtgggcccatggcccgggccaaggcccaagtggtaagtgccacattgacatggcggcagtggccccccacccaggaagagatcaaacatggttttcacaaggtgtccctggtgtcaggggcccagatggaagccccgcagaaggagatgtttgagttcagccgtcgagaggaagtggaagtcaatggctttgcaacacaggaagaagagactgtgaattgccagggccctcgggatacagctggctccaagaacttccagagccatggacccatcttttccaagaagtacataccacctcccaaggagaaaaggcctgaggggaggctgaaggaggctgtggaccagagtgatggcagccgccaagctcccaggactgagcccccatgtgtgggagctatggccaggactgagcttttggttcccctgcctgggccccgagagccaagtccccacccaggtgtaggtctcaccagtggtagctcccggagcctcgaggaataccgagtgacacgcactgtgcggaccaccacagtggtgggaggtcatgtggaccggcggatgagcagctctgtgactgtgaggccagtgtcctcaggcgaggccctgccacggggccgtcaggtctcccgcatggtgccgccagtggtggtgggctccccaccaggctcgcccagccgcagccaggccgtgaaagtgctaagtaacctcgtgcctgctgggcacagcccccctgccagtcacctgcccaggcccacggctggcgggccaaggagcacaggtctgggcagcacagtgggggcagccttgaggcagctgcctgagaccgggacagcagagcttaaagacagctctgccctggcctctacaggcatcccagccagtgctcacctgcctaagaatcaggatgcccctgcagcctgtccggacagagaccagggcagagccccggatgccagggcctgtgagctctggcaggtgctgggagcccccagttccactgagctccctctccagacttctcagggtcaagcatcagtcccctcctctcccagactcgagacccatgtcccctctcctggcctaactcaccctgcaaagcagcctgtggtgcccactcaccccggggcccggctcactccccttgttctgccccctaaaaaaaggacgggcccgtggacccccctgctgccaccgtcctgcccatggtgaggagcgagcatgtgacagtccctggacaacctcctgctccatccactacaagaaggaaggatgtccccagcccaggaggtctttctgctccatcgtccccaaggaataagtttgttcagaactctgaaaatgtccctgtcctcccctttacccagagggaggtcgtgaagggccccggtgctgtgggccgagagccgcctgccgcgccagacgtggagcatcagtgaatcgggccacatctgcagccagatgttcgaaggccagatcctggacgtgaagggaggccggggctacgaccgggaccacgtggtgctatgggagccggatgaggacagggcatcccagatctggactatccacgtgctttgaaacttttcccctcaccctccagccctggaggcttttgctgggatgaatgtttttatagggtttttgttgtaacataagctattttct

SEQ ID NO: 57425 - DNA, 3606 bp, Homo Sapiens
aaaggtgactagagtgctaagccagtcaacagggaaaacttggctcctgactttgggtctttcttctcagtctatatggaagaaaactgagaaaaaatataaaaaagaagaacacaactagttgcgcatctcctaaagagatggaatcgccacttatatatgtttcagttttgcttttgaacatatttgaattttcatcaggaatagtatataataaagatgatacagagaaacgctttgcatgttctaacaaagggttccctcaagagaatgaaataatcaagttgtatcttttcttagaaaacttgaaaatccagtgtttcttccaaactgaaaatgaaattgcatcaaaagcaatgctaagtgtgttcacatcaggaggacttgctcccagcttgggaatcatgaatagtacatataatggcatcttccactttaatttaacgttgttcagtgatcggattttgtggttggttgatattcctagagaaaacatcacacaaagcacagatattgcagctgtagaagaatggttagtaagaatcactttacatcatggactaaatatttatgctactgaaggaactctattggatgttattcgagaaccgattcttcagtggactcctggggatgtgattccagaaagtgaaatcagtaaattatatccacatgtggtagatctcaaagtgacaaaatgcccctgtgccaatgatgtggcattactaggcttcattgtggatacaatagttgatggtgtttacataggcataacctttggtggattctggcatgattatgataccacatggtttaacatgacacagactatctattcccaacttcaagaagaatatgaagacctttcattggtggatatggttttaacgaatcattttttagttatcctcacctctttgggcctttttgtaagtgaagatcttcgttatccatcacgccacagcttatcgttttccagggcagacttttgtggttttgaaagggttgactatgtgaaaggaaaactgtggtataatgaaagatgttttgctaacagagagcactttgaagttgattatgttacagttacctttgagagaaacagaaccctaagtgagtcaagctcttgtttttatagtcaggaaccatttcttgaatgggtaccctgcttacctcacatttttaaaggaataaaaatttttccaactgtgctaacatttcttgttgaccaagagcgtggtactggagtttacctcttctataacaaggtcaggaaaactgccattgcctctgtgagcaccctgagaaataatgaaccaaattcacaatcaaaatttccaatttttcggtttccttcatcattctcttctcccgttggaatggtatttcatccccgaagccactttttgtatgcttatggcaatcagatatggctttcagttgatggcggcaacacctttcaattaatagctaactttcatgatgatatcataaagaagacttttcatagtttttatacatcagctattacttttgtttctcaacgtggaaaggtttactcgacaaaggcaggaatgggaagatacagtgcagtcggaagtgttactgagagaattttcacattatactatgatcacttgggattcctacataagctgactctgggtcgctttgaagctagtggaccacccacagcctttggaaattctagaaatctttttggacagcctccagatatgggctttgagactgcgcttgccccacagcacacctccttagatgaaattatcttttttgcatatgtacctgagaacgaaccccaggaaacgatctacagcaagaagttcggcaatatacactatggaaaagtgatacactctgggaaaactggaagagcttacataagaaaggtattgcaacatacgactcctaaaggatttttgtcctcagttattgcagaaatgaaagagccctttggattagaagaagtgaatgagagctcttgtttgtctagttcccttttgattaataaagctggaaatgtctataaactcactcttgattcacaagttgttcaggccttgtttgaagatacagatatagagaagactgtagtgcttcccgggtacagcagcttcctcatcacaagcattttagataataagaatgcattagccattgctaccatgcctgaaagtgcacccaacaatatgacctttctaaagagcacatggttcttatacaactttgggcaaaggaatggacgaacatggaaaatatattcaaaaccatgtaattattggtttcaacatgatgattcaccatccctcaacattgtgaaatacattgatctgggaaactcttatgttttaaaagctaaggtcatacggaatgcaaaaggttttcgaatgcttgaaataccactactgactgtgtttgttggaaaccctaatttgttggaagttacagctgaagtcacttttgatgatactgacagttatgtaataacaatttctgcagctagcaaagttttacatcagggttcaacttcactggcatttattatgtggtcagcctctactgagtgctttgttacgacaatggtgccaacactgaaaagcagctgtagttatctcagatctatgcatcacattcctagcaaatttatcccatttgaagactggattagtggagttcataaagacagtcagggttttaacctcatcaaaactttgccgataaactacaggcctccatctaatatgggaattgctattccactcacagataatttttatcatgcagatcctagcaaacccataccaagaaacatgtttcacatgtcaaagaaaaccggtaaattcaaacagtgtgctaatgtttccactcgggaggagtgtaactgcacaaaggatcagaagttttcacatgctgttgctttctcggattgcagggaaaaagttcctcgctttaagtttccaattacacaatatccagtttctttggaaattatcaacgaggatggacgtgtcccattgcaatctccatatctggttactgtgactgaagtgaacatgaggcacaactggaaactgaaacacactgtgccagaaaatattaaaagaatgaaacaattagtagaaccaattcttggtgctgcagtgtataatccttcaggtctcaacttaagcataaagggctctgaacttttccactttagagtgaccgtcatttcaggagtaactttttgtaacttaattgaagaatttcagatttatgttgatgaggcaccattgccattcccaggacacacgcttattgccgtggcaacagcggtagtgctagggggattaatttttatagcatttatgtttcaactgcaaggcatccatccgtggaggacattccaaagatggattagaagaaaccaagagaagttttcaagtatctctctcagtgagctgattcatagatcaaagtctgaagagtgaacacatggtgatcataatttctctttattttctagttttatcagccaattcctagaacaatatatttaaatgttaaatatgcaagctacataaaatcctaaagaattgtcattat

SEQ ID NO: 57426 - DNA, 3830 bp, Homo Sapiens
ggtgtttataagaatggaagtgttgtttccttgcccgattccttcatgctatatctcatgaacctctgtaatcttgggggagagactatatttaatgatgacaaacctgtcaccagtgtagcaacaacagtgtgaggacaaaagcaaataaaaattaagaagcgttcaaatttatattcaacaaggaagtcatttcaatcaacaacttctgctgcattatttttccaagatgaaccgatacacaaccatgagacagttgggggacggcacgtatgggagtgtgcttatgggcaagagtaatgaatccggggagctggtggccatcaaaaggatgaagagaaagttctattcttgggatgaatgcatgaacttgagagaagttaagtctctgaagaaacttaatcatgccaatgttattaaattgaaagaagttatcagagaaaatgaccatctttattttatatttgaatatatgaaagaaaacctctatcaattaatgaaagacagaaacaagttgttccctgaatcagtcatcagaaatattatgtatcaaatattgcaagggctggcttttatccataaacatggcttttttcatagggacatgaaaccagaaaacttgctttgtatgggtccagagcttgtgaaaattgctgattttggacttgcaagagaattaaggtcacagccaccatacactgattatgtatctaccagatggtatcgtgcccctgaagttttactgagatcttcagtttatagttctcccattgatgtgtgggctgttggaagtatcatggctgaactctatatgttaaggccacttttcccagggacaagtgaggtcgatgaaatctttaaaatttgccaagttttagggactcccaaaaaaagtgactggccagaaggataccagctggcatcctctatgaacttccgttttccccagtgtgttcctataaacttaaaaactcttattcccaatgccagtaatgaagctattcagctcatgaccgaaatgttgaattgggatccaaagaaacgaccgacagcaagccaggcattgaaacacccatattttcaagttggtcaggtattaggcccttcgtcaaatcatctggaatcaaaacagtctttaaataagcagctgcaaccattagaatcaaagccatctttagttgaggtagagcctaagcctctgccggatataatcgatcaggttgttggacaaccccagccaaaaactagccagcagccactgcagcccattcagccgccacagaacctgagcgtccagcaacctccaaagcaacagagtcaggagaaaccgccacaaacgctattcccgagcatcgtcaaaaacatgccaactaagccaaatggcacactgagtcataaaagtggtaggaggcgttggggtcagactatcttcaagtctggagatagctgggaagagttggaggactatgatttcggagcctcccattccaagaagccaagcatgggtgtttttaaagaaaaaaggaaaaaagattctccatttcggcttccagagccagtaccctcaggctccaaccactcgacaggggaaaacaagagcttacctgctgttacttccctaaaatctgattccgaattgtcaactgctccaacctctaaacagtactacttgaaacaatcaagatatcttccaggtgtgaatcccaagaaggtgtccttgatagccagtggaaaggaaataaacccccacacttggagcaaccagttattccccaagtcactgggacccgttggggcagaacttgctttcaaaaggagcaatgcaggaaatcttggaagttatgctacttacaatcagtcaggatatattccttcctttctcaaaaaagaagtgcagtcagctggccagaggatccacttagcacctctcaatgcaacggcttcagaatatacctggaacacaaaaactggtcgggggcagttttcaggacgtacttataatcctacagcaaaaaacctaaatattgtgaaccgtgcacagcccattccctcagtgcatgggaggacagactgggtggccaagtatggaggccaccggtaggagtctatggtgtgaaaccctacagcattgctccgtagagtacgtgcaagttccttgaccctgggaaatgtctacaaatgtctatttctactgagttctggaagaaatatgcaaaagtgggtacttggaagggcaaaaatcatcccctattttacttatttccaagaaatgcattttcttagcatcattgcccacagtgttgatatatgggtaggatgttacaaagtattgaataaactatttgccaaagtatgaagtatttgatctacaatttaataaatagtaaatccaataagaacccttaaaaaaaaacaacttccagaaaatgtttagagtgttttagttttcatttgttgtatgtgcccaaatggtttagtagttcttcactttgctgtggttggcttaagaggtttgtcttttgtttttgtacagcagttgggccaacctttgctggctgtcagctgtggttcttatttgactaaggctctgcgctgccattttgtcaatgacagaaagattgcaattatttgtttttctactttgaagctatgggagcgatggtaatttcaatcttgagcaggatatctttttttttttttttgaggcgatgtttcactcttgtgtccaggctggagtgcagtggcactatcttggcttactgcaacctccacctcctgggttcaagtgattctcctgcctcagcctcccgagtagctgggattagaggcgtgtgccaccatgcctggctaatttttgtagtattagtagagacagggtttcaccatgttggtcaggctcaggctggtctcaaactcctgacctcaggtgatccacctgcctcggcctcccaaagtgcagggcttacaggtgtgagccacagtgcccagctttttttttttttttttagaaataaatttatctttaacatagagaatatcaaagttatgccacttgattttagtggacggcttgtgttttgatcttgaccagtacagttcccatgaattcaaggtgacaatcaagcccaatggcttgatgacttcaatagtaaccaagtcaaggttctcttggctggacatcattaagaaagttctggaaactgtgtttgtttgatgctggttcattggacttttcaaattgttttgtttctgtgtccctaccagacacaaagatgaagtgtgccagctggttcccccaagccagctcatgctgctgaccactgactcagctctgaccttcacatttgctctgaagcaagtgcgttcagctgctggggcagtgatatcacatagtacatatattatttccttagtttatttccaaactggtattttaaatagacacttcgaactttgggctactctgtttaaatctgccactttctggactggaccttagtactgtaaattctttttaaagaataataatgttaccaactgctgagatttttatgtattttgtgactttgtaacaactgctattgtaataagtgtcatcttgtgggcattatacaaaggcatattataaaataataatgatatttttgtatagaagagtcaactgttcagatgtaagatgttgaaaaatgttaaaatctaaagagtaatttatcctagtggtaatggttatatgtatttgtacagtttaaattaatgtctcaaagctgtgcagtcttttgttactgggacacttttaaactctgaataggcattaaaaaaaatatggctaa

SEQ ID NO: 57427 - DNA, 1817 bp, Homo Sapiens; identical to SEQ ID NO: 30741

SEQ ID NO: 57428 - DNA, 2563 bp, Homo Sapiens
aaaaacatggaggagcgggagcggggggcgaggtcggctggcgccgggagccccgcgcgcccgcccagcccgcggctggatgtcagctctgacagcttcgacccgctgctggccctgtacgcgccccgcctgcctcccattccctaccccaatgccccctgcttcaacaacgtggcggagtacgagagcttcctcaggaccggagtccggggcggcgggcgcgggcgcgggcgagctcggggcgcggccgcgggctctggggttcccgccgcacccgggccctcgggcaggactcgtcgccgcccggacgcgcccgccccggaccccgagcgcatccagcgcctccgccgtctcatggtggccaaagaggaaggggacggggccgcaggagcgggccggaggggtccgggtcggagcaggaaggcgccacgcaacgtgctcacgcgaatgcccttgcacgaaggcagccctctgggtgaactccatcgctgtatccgtgagggggtgaaggtgaatgttcacatccgcactttcaagggacttcggggcgtctgtacaggcttccttgttgcattcgacaagttctggaatatggcacttactgatgtggacgagacctaccgaaaacctgtcctaggcaaagcatatgaacgggattcttcactgactctcactaggctatttgatcggctgaaacttcaagattcctccaagaaggaagcagattctaagtctgcagttgaagattccactctgtctagatactcacagacatccacttggaagttggcttcagtgtggggaagagcagacactggccggggctcacacaagcgttcccgctctgtcccttcttccctgcaggcctctgcaagggaggagtccaggtcagagctgtcagggaggactacacggacagacggctccagtgtgggaggtaccttttccagggctaccaccctttccagaggccagtcccgtaagaaaaagcgaaagcccaaagtggattaccagcaggtattcactcgacacataaatcagattttcattcgaggcgagaatgtcctgctggttcatcttgcacagtgaccagctcagcctgagctttggtttttagaaataaagtgcatgaattgctgctatgctgtatcctagtatcccagtgaaactctgagttggaatgattccctctggtcctgcatatgcagaggacggagcaggctcagccccctggaagatgagctcaaggggaggacaggccttgggagggcaggcgtttgcattaatatcaaggcaaaaagcattcatagatacatgcatctgatttggtattgtgatttacttcagaccctgaaaccaaatatctgatcttccattagacttaggggtcatgatatgagtggaatttacattttagatactataggggaaagaaaagtctcaaaaagaagtattgcatgtctaaaagctagtgccctgagtactcatgaattcgattccaagagtagtggtgtaaattgccttggagccctgcatccacgtcttgtaactaacttttgaattttgcctgacatgattctctcttgatgaagaaatgacatatattatctttgaatatctacaaggaaagttaccaacttatgtaggggtgaaatttggataggcggtatgctcaaagcagccagcaatgagtgctctgttttgatccttcttattattatggaaaggagtacaggacctcttcagtcttccccttaccagaggtagcctctgcaaatggcataccagatgggactctaagatgcttgtgtggtggcttcttgtccttctctttgacttctgtggcatggtgctagtgcatgtaccctgtggtattgcccctctgtccgtagtgtgaactgtcctgtgagctttatgtcaggagactgtgaccttcatgtccagcttcaaagagttgtgcatgaactcggtaatacacatcacacggctgagagtcccctttccaggcagggccagcatgtgtagaatatctttcagaatatggtttcaccatgaaacaggggtggtagatttattcccttgtgtcaggccaaagaagttcttacaaagtacagtgggtagtgtctaaagcgacactttactcacagcctggcttgagtcaacaggaacaccatagcacccacaaatacttctacttgaatcatattctgtgctttttcaatcactagtgcagaataggctgcatttgacacagactgttaggcaatattgatttttttgttttgtttttatttggttttatctgagataacttatgttcaaggtgagaataagaaatagccaactagttaaaatgtatgaaaagaaaactttcccctgctgtatttgttgtgtaacataaataagccttctgagaagcagggtgaataaagtttagggagctgggacacctggtcctgctagctggaccactggctcatcatgcaatgaaaaggtgagcagacttaacccctccgtgcctcagctttttccccacagacacctacctcacaggggcattgag

SEQ ID NO: 57429 - DNA, 3160 bp, Homo Sapiens
atacgatgtactttttttaatgccgttgaaacagagttaatttcctttagcacacaagtcttagagacaaaagaaaaaaaggtctgcaacatgaaagtcacaggcatcacaatcctcttttggcccctctccatgatattattatcagacaaaatccagtcttctaaaagagaagtccaatgtaattttactgaaaaaaattataccttgattccagcagatatcaagaaagatgttactatacttgatctcagttataaccaaattactcttaatggtacagacacaagagttctacagacatactttttactcacagagctctatttgattgagaacaaggttactatcttacataataacggttttggtaacctctccagtctagaaattttaaatatctgtagaaactccatctatgtaattcaacagggtgcatttttaggcttaaataaactaaaacagttatatctctgccaaaacaaaatagaacaactgaatgctgatgtatttgtgcctctaagaagcctaaaacttctgaatctgcaaggcaatttgattagctatttggatgtaccaccactatttcatctggaattaataactttatatggaaacctatggaactgctcttgcagtctatttaatttgcagaactggttgaacacatcaaatgtgacattagaaaatgagaacatcaccatgtgtagctaccccaacagcctgcagagctacaatatcaaaacagtacctcataaggctgaatgccactcaaaatttccttcatcagtaactgaagatctttatattcattttcagcccatcagcaattcaatatttaatagctcttcgaacaacttaacaagaaattcagaacatgaacctcttggaaaaagttgggcttttcttgttggtgttgttgtcactgtactgacgacttcacttctcatttttattgctatcaaatgcccaatatggtacaatattctgcttagttataatcatcatcgcctggaagagcatgaagcagaaacctatgaagatggttttactggaaatccaagctctctttcacagataccagaaacaaactctgaagaaactacagtaatatttgaacaattacattcatttgtggtagatgatgatggatttattgaagacaaatatatagatatccatgaattatgtgaagaaaattaatttctttcaaagtttgctttttaaagcaaagttatcagctcactcagtttagatatggagattttgctatgtgacataacaaaatacagctggcaggcattcatattaatgacaacatacatgaatatcataaaattatgttctttgcattatattgagcaagcaggttcaaatacagtaactgacactcctcggtagttgacagttacatagtctacaatactagcactactattcttagcagtgcttgggtgaccatacgaactagtaaaaaggtctaaattattcatgaattaaaatgaatggattctcatattaacacaggtatttgacataatatgtattaagttatactaatgtttcaatcagtaaagaaataaaagtttaggatttattaatatatggaagtcaaagtgaggaacagagatagcttaaataatacactaagattgattttatgctcccagaataaaatcatagagttggaaaatatttttttgaaatgcttcctgaaatagcacaataaatttcccttaaaatttcatagcaatttaaagcacaagcacaatgttcaggcataatccctaataagtcactattgattctggttataaagaaaggctgtcaccataatgcaggatcactacagtttaatgtcatactggcttccaaagtgggcatcacaattatctataaatcttgttttaaaaatacatatttctacctctctctgggagatttttattcaaattggtctgtgctgacactaaggaatcttcatgtggtccatggacagctatttctatctattcagtagatagagcaatgtttcccaaattgtttttctagaatactaatttccagagagacattcacaagtatttacagaagaagaaggaggtacatggtcaaattactacaggaaaaactagtagtttaaacaaggtgaaacaagattctttttcttttttttttttttttttttgagacaaagtctcgcactgtctcccaggctggactgcagcagcgcagtctcagatcactgcaacctccgcctcctgggttcaagcaattcttctgactcagcctcccgagtagctgggagtacaggtgcacaccaccatgcctggctaatttctgtatttttagtagagacagggtttcaccatgttggccaggctggtctcgaacgcctgacctcatgatctacccgcctcggcctcccaaagtgctgggattacaggcatggagcaccgtgcctggccaagattctttacaataggatttatgtaaaacttaactaagctaaactgctctctgattattcaagagcaaagtattaaaaatttctcgaacttacttgacaacaaaacccattctttcagttacatctactaagagctcgtagttcaataacattccaaagaacgtagtttggaaaacactggcctatcggctgtaataggaagggtctaaagaaaattatttgctgagtcctcataatcaattggctataatcacaatttaataatttatcaatgcaaacagtacattaaaaactgtagcacaatctataatttttaccttcatatgcagagaaattaagaatttacatcttttacaaatatgtgtatctctgaaataatgaaatatattgatgggtgaaataatatttctggtattttcttcattataacacgtggaatgggacagtggctagaggtatggatggagcaaggtcaaatatgagctgatggagctgggcgctaaataagggtataatatgctacttctgtgtatgttgtgtatggtatagtatgctatttctgtgtatgttcaaattgtttatgtatataataaagttttaaaaatttgtatgtacttgacaattccttagaaaaaagaggctaaaataaaatagatctacgtcataaaaaaaaaaaaaaaaaaaaaaaaa

SEQ ID NO: 57430 - DNA, 2907 bp, Homo Sapiens
actgcccccgccactcctttagactctggacgtgcggggactggtggcgctcggcctcgcgttataaaaagcggtggggcagggccggcgagacaatctgggaggcgggtaccgggcctcacggatccgcgccgcgccccccacctgtggctgcgcgcggggtgggctgcgctcccctgggcggcgccgggcgcccggggctggtggcgagatgggccgctactctggcaagacgtgccggctgctcttcatgctggtgctcaccgtcgccttcttcgtggcggagctggtctccggctacctgggcaactccatcgcgctgctctccgactccttcaacatgctctccgacctgatctcgctgtgcgtgggcctgagcgccggctacatcgcccggcgccccacccggggcttcagcgccacctacggctacgcccgcgccgaggtggtgggcgcgctgagcaacgcggtcttcctcaccgcgctctgcttcaccatcttcgtggaggccgtgctgcgcctggcccggcccgagcgcatcgatgaccccgagctggtgctcatcgtcggcgtcctggggctgttggtcaacgtggtggggctgctcatcttccaggactgcgccgcctggttcgcgtgctgcctccggggacgcagtcgccgcctgcagcagcggcagcagctggcggagggctgtgtccccggcgctttcggggggcctcagggcgcggaggacccgcggcgcgcggcggacccgacagccccaggctcggactcggccgtaaccctccgggggacctcggtggaaaggaagcgggagaagggggcgaccgtgttcgcaaacgtagcagaacttatacacaacacaaggtttcttctttgaatgcaggtgattccttcaacacccagaatgagccagaagacatgatgaaaaaagagaaaaagtctgaagctctgaatatcagaggtgtacttttgcatgtgatgggagatgccctggggtccgtggttgtggtcatcacggccatcatattctatgtgcttcccctgaagagtgaggacccgtgtaactggcagtgttacattgaccccagcctgactgtcctcatggtcatcatcattttgtcatctgccttcccgcttatcaaggagaccgctgccattctgctacagatggtcccaaaaggagtcaacatggaagagctgatgagtaaactctctgctgtgcctggaattagcagtgtacatgaagtgcacatctgggaacttgtaagtggaaagattattgccaccctgcacatcaagtatcctaaggacaggggatatcaagatgccagcacaaaaattcgagaaatcttccaccatgcgggaatccacaatgtgaccatccagtttgaaaatgtggacttgaaggaacccctggagcagaaggacttactgttgctctgcaactcaccctgcatctccaagggctgtgctaagcagctgtgttgtccccccggggcactgcctctggctcacgtcaatggctgtgctgagcacaatggtgggccctctctagacacatacggaagtgatggcctcagtagaagagacgcaagagaagtggctattgaagtgtctttggatagctgtctgagtgaccacggacaaagtcttaacaaaactcaggaggaccaatgttatgtcaacagaacgcatttttaatctggtactcacataatcagaccatatagacgaggcactttggaaccacaagcttggctcacaaaaagagctttctgggttgtaggcccagactagacttgcagcatgcatgctctgtgttcactaggggttggctgtttgggattttagttaaacgtgtctgtgaatttttatgtaactaactcctttccattcccctgggtgtctcatgctgctctttgactgtttcagcttgaacatgcattttctaaagcaaactgcactagtgtatatatcagggacattaaagtctgggactggggctcaatagctgcggatacagtgttcaaagaagttcttgtttctaaactgattagaacttctagctaatgctcaggtgagatcatagcttaaatacattgaaaaaactaaagtaccacaatagctgtatttttcccaatccccttaacgatcataaaagaggcaagttaagtatttctggcactgaagaaatatcttttttctttgattcatttttgaataaatataaaatgaataactattaaggtagaaaatattctcagaacattctagaggaggtaaaggttagtaggagggcgttggccatctctacattttgtgaggtgagagaaaactaatgtttactttctgctgtgaactgaactgcagctatagaatgtttcaaatgcttaaatatataatacatttttttccatggaagtgagggaatatttcagtttcctgaagtatgacacaaatactcatatactgtcttttagagtcagtatagttggagctgttttcatttagtgctttgataatgatttacttatttttccaaatttcgtttgaattttctttcatatgattgcattgatctatgcagcatttaccagaaaagagtattcctgggatagcagaatgcataacactgagtgttaattcttgtgaaataaataagctagactgccttctctttaattagacatattttaaagtatttattatagttgtcaactagtaactcaatgaaaaagttgatgcccaagggagaaatgagaattagcttaattgctgcctttaatgtgtttttgaggaacttaaaattttctttcatgtcgctgatccatattaccaagttcaaataaaatttttataatcggattcagacccataaccaaactaaaaaaaaaaaaaaaa

SEQ ID NO: 57431 - DNA, 1965 bp, Homo Sapiens
gtcactgtcctctcggcctggcacacagcgctccggccgccgaatgcccgtggacgcgcatctcttcccagagttcctgcttcctgggccagccaaagccgcaggtgagaacgtccgcggtagaggtgacacccagggcctgcgggtctcagaggcccggtggccagctcctctcctccttgcccaagaaacccccacgggggcgcctgcagcggggacaccaagtgctccccggagccctgggagcacttcttctgaggcatggagcccctgctcaggtgcttctgaaagttcctttgtggaccgcagaaacccctaggcaactgtctgccccgccccgcgcccccgccgccccccgcccccgcagtacccctccggcccccgacatccatgatgcgcatgcccaggggccctgtgagctagaaagtagctgagctggtgcagtacctgctggttaagaaccggaagacggtggcgatcaaaagggcagacatgctgaagtatgtcatcaaaaggtacaggagcttcctccctgagattttcaagaaagcatctgacctccccgagttagtctttgggttctatctgaaggaacttgatccagcagagcactcctatgtcttgatcagaaaaatcgatcctgccctggtttggggcctgacaggcgaccagggcacaccaaagacccggctcctgatgattactctggactcgatcttcatgcaggccagctgtgtccccgaggaggtggtctgggaggtgttgagggtgttggaggcacatttcgtctaaaaagcatttcgtctttggggagtccatgaagctcatcaccaaagctagtgtgcagcaggagtatctggtgcacaaataggtgtcccacagcaatcccacgctctaggtattcttgtgggggctctcaaaggaaacaagacagatggaagtcccggagtttgtggccaaagtgaatgacacccaccccagttcctttccgtggcagtaaatgaggcattgagagaagaggaggagataccccgtgcccgagatggcagctgccgttggtgacgtgacaagtgccagtgttagtgccagttccagttccagggcctatgccatggctgaagcaagcatcagcaccagcaccaatgcaagtgccagttgccagtgccagggctagagccatggctggagcaagtatcagtacctgggacagtgccagtgtggttgcaatctcaggctagtgtcagggactcctcctgccagcagtgaaggctggggctgagtcttcactttgttttgctgtgggtagtcaaaagggccccacagcagtgggtgctggggtcctgacttttcaagagtcgaggggtagagtggggttagggagaacctgccgcccatggtatctgtgttccagttctatttgtctttctcagtgatttagctttcaatttgcatactgcaaagttttgtttgccttaattaacttttttttataatgatgatcattttacaggaaataaactggttaaaactacatgatgacagaattatatcagagttgaaacaaacgccatacctaagcattttttcaaaatcctttgttccatagacacttgattgagtacttaagttgaacatctaggtctatgaatgacgttggtcaaatgttttattgttctctgtttcggttttagcaggagagatttgctgtttcataaaagaaattgggagagtatatcattttatgcctgtaacttattatagcattggaataagctgttctttggaggtttgagagactttaccagtacaaccattccccccctcccccaaatataaaaagataaaataaaaagccggtcagtgtctgttgcacaaaattacaaccgctctctgcttgtatttgcctagttctccagaatgtagggaaaaataaaaattcaatgaattagaaaaaaaaaaaaaaaa

SEQ ID NO: 57432 - DNA, 7445 bp, Homo Sapiens; identical to SEQ ID NO: 31595

SEQ ID NO: 57433 - DNA, 3251 bp, Homo Sapiens
gctacacaccactctggcttacgcttccagctaacagcggtttgtctgtgtttctggactgaagtgactgatgaaaaacagtagtcaagtctggagggtgattccctttcagttcacttgcctttcagttctggggaaattagaagatttgctctctctctctgcttcttagaatgggctgcaatttgtgcacttttcagaaaagagaggaacactacaaactgctgtatgaagtttcccaggtcaatgggaaggatctttcaaaggccactcatgaagaggcagtggaagcttttcgcaatgccaaggagcccattgtggtgcaggtgttaaggcgaacacctcttagtagaccagcctatgggatggcttcagaagtgcagcttatgaatgccagcactcatacgtacatcaccttcgaacacatcatggctctggccaagcttcgtccacctacccctccagtgccagacatctgtccattcctgctctcagacagctgccattctctacatccaatggagcatgaattttatgaggacaatgagtatatttccagcttgcctgctgatgcagacagaacagaagactttgaatatgaggaggtcgagttgtgtcgtgttagcagtcaagagaagctgggcctgacagtctgttaccgaacagatgatgaagaagacaccggcatttatgtcagcgaggttgacccaaatagcattgctgccaaagacggccggattcgagaaggggatcggattttgcaaataaatggggaagatgtccagaatcgagaagaagcagtggccttgctgtctaacgatgagtgtaagagaatcgtgctgcttgttgcaaggccagagattcagctggatgaaggctggctggaagatgaaaggaatgaattcttagaggagttaaacttggagatgttggaagaagagcataatgaagcaatgcagcccactgccaatgaggtggagcagccaaaaaagcaagaagaagaagaaggcacaacagacactgcaacatcctcatccaacaaccatgagaaggacagtggagtaggacgtacagatgaaagcttgcgaaatgatgagagctcagagcaggagaatgcagccgaggaccccaatagcacatctttgaagagcaagagagacctggggcagagccaagacactctgggaagtgttgaacttcagtacaatgagagcctcgtatctggtgaatacattgactcagactgcattggcaacccagatgaggactgtgaaagattcaggcagctcttggagctcaaatgcaagattcgaaatcatggagagtatgacctgtattactcaagcagcacaattgaatgcaatcaaggggagcaagagggagtggagcatgagctacagttgcttaatgaagaactgagaaacattgagcttgagtgtcagaatatcatgcaggctcacaggctccagaaagtgacagaccagtatggagacatctggacattgcatgatggaggattccggaattataacaccagcatagatatgcaaaggggaaagctagatgacatcatggagcatccagaaaagtctgacaaggacagttctagtgcttacaacacagctgagagctgcagaagtactccgctcactgtagaccgttcccctgacagttcccttccaagggtgatcaacctcaccaataagaaaaacctgagaagcacaatggcagccacccagtcctcttccggacagagcagtaaagagtcgacctccaccaaagccaaaaccactgagcaaggttgtagcgctgaaagcaaggagaaggttttagaaggcagcaagcttcctgatcaagagaaggcagtcagcgaacacatcccttacctctctccttaccacagctcctcatatagatatgcaaacatcccagcacacgcccggcattatcaaagctacatgcagttaattcaacagaaatctgcagtcgagtatgctcagagtcagctcagcttggtgagcatgtgcaaggagtctcagaagtgttcagagcccaagatggaatggaaggtgaaaattaggagcgacgggacacggtacatcacaaagagacccgtgcgagaccgaatcctgaaggaacgtgccttaaagatcaaggaagagcggagtggcatgaccacagacgatgacaccatgagcgagatgaaaatggggcgctactggagcaaagaggagagaaagcagcacctggttagggccaaagagcagcgccgtcgccgtgagttcatgatgcgaagcaggttagagtgtctcaaggagagccctcagagcggcagtgagggcaagaaggagatcaatatcattgaactgagtcacaaaaagatgatgaaaaagagaaacaagaaaattttggacaactggatgacaatccaagaactgatgacccatggggccaagtctccagatggcacgagagtccataatgccttcttgtcggtgaccactgtatgaccgaatgaatggaatgcatgcgactgattttaggaggatgctaccagtttcggtagagtatgattgcctcgttcaatgtggcgtttttatatatattttgtgactctttatagtttaaattttttgtaagcaaaaaatacctggtaatttttcatttgtttttcatatactggtaccttctttttggctgagatctttcttttacttgtgatatattcatattactcgtttataaaaaatcaaaaacaaaaggaaagaaaacaaaaaaaacttgcacaaaaatactgaggagccaattaatttcctacttcaatgtatctaatgtaagtgaaaatctggatttatttctctagtttacttattttctactttaataataactcaatgccaaaatatttctatgcttgtttcttggcataatacattttaaatcaaacctgttcgtaataaatcatgtgccacatcttgtcttacacataaaagccactgcttttaacatcccattgtacatttaacacataaatggtgttaacatcccattgtacatttaacacataaatggccattgtctttgtctcagtaaagtgtaggtggacaatcttcctgtgatatgtagtgacattggtcatgtagctagataattatggtaattgtgacaattaaagagaaataaattattgattatccttcagaaaaattaaaaaaaaaaaaaaaaaaaaaaaaaaaaaaaaaaaaaaaaaa

SEQ ID NO: 57434 - DNA, 1704 bp, Homo Sapiens; identical to SEQ ID NO: 30281

SEQ ID NO: 57435 - DNA, 1930 bp, Homo Sapiens
gaccaagtggctcctgcgatggcggcggaagaggaggctgcggcgggaggtaaagtgttgagagaggagaaccagtgcattgctcctgtggtttccagccgcgtgagtccagggacaagaccaacagctatggggtctttcagctcacacatgacagagtttccacgaaaacgcaaaggaagtgattcagacccatcccagtcaggaatcatgacagaaaaagtggtggaaaagctttctcagaatccccttacctatcttctttcaacaaggatagaaatatcagcctccagtggcagcagagtggaagatggtgaacaccaagttaaaatgaaggccttcagagaagctcatagccaaactgaaaagcggaggagagataaaatgaataacctgattgaagaactgtctgcaatgatccctcagtgcaaccccatggcgcgtaaactggacaaacttacagttttaagaatggctgttcaacacttgagatctttaaaaggcttgacaaattcttatgtgggaagtaattatagaccatcatttcttcaggataatgagctcagacatttaatccttaagactgcagaaggcttcttatttgtggttggatgtgaaagaggaaaaattctcttcgtttctaagtcagtctccaaaatacttaattatgatcaggctagtttgactggacaaagcttatttgacttcttacatccaaaagatgttgccaaagtaaaggaacaactttcttcttttgatatttcaccaagagaaaagctaatagatgccaaaactggtttgcaagttcacagtaatctccacgctggaaggacacgtgtgtattctggctcaagacgatcttttttctgtcggataaagagttgtaaaatctctgtcaaagaagagcatggatgcttacccaactcaaagaagaaagagcacagaaaattctatactatccattgcactggttacttgagaagctggcctccaaatattgttggaatggaagaagaaaggaacagtaagaaagacaacagtaattttacctgccttgtggccattggaagattacagccatatattgttccacagaacagtggagagattaatgtgaaaccaactgaatttataacccggtttgcagtgaatggaaaatttgtctatgtagatcaaagggcaacagcgattttaggatatctgcctcaggaacttttgggaacttcttgttatgaatattttcatcaagatgaccacaataatttgactgacaagcacaaagcagttctacagagtaaggagaaaatacttacagattcctacaaattcagagcaaaagatggctcttttgtaactttaaaaagccaatggtttagtttcacaaatccttggacaaaagaactggaatatattgtatctgtcaacactttagttttgggacatagtgagcctggagaagcatcatttttaccttgtagctctcaatcatcagaagaatcctctagacagtcctgtatgagtgtacctggaatgtctactggaacagtacttggtgctggtagtattggaacagatattgcaaatgaaattctggatttacagaggttacagtcttcttcataccttgatgattcgagtccaacaggtttaatgaaagatactcatactgtaaactgcaggagtatgtcaaataaggagttgtttccaccaagtccttctgaaatgggggagctagaggctaccaggcaaaaccagagtactgttgctgtccacagccatgagccactcctcagtgatggtgcacagttggatttcgatgccctatgtgacaatgatgacacagccatggctgcatttatgaattacttagaagcagaggggggcctgggagaccctggggacttcagtgacatccagtggaccctctagc

SEQ ID NO: 57436 - DNA, 4627 bp, Homo Sapiens; identical to SEQ ID NO: 30771

SEQ ID NO: 57437 - DNA, 3493 bp, Homo Sapiens
gggaagcagatctcttggagtgaaggctgttagtcgccgcgtagaaccctggaagaagaggaagaggaaggcaaaggagtcagggatggctcttcctcagggacagttgacattcaaggatgtggccatagaattctctcaggaggagtggacatgcctggaccctgctcagaagactttgtacagggacgtcatgttggagaattataggaacctggtctccctggatatctcttgtaaatgtgtaaacacggatttgccaccaaaggggaagaacaatatgggagaagcgttctacacggtgaagttggagagacttgaaagctgtgacactgcaggcttgtccttccaggaagttcagaaaaatacatacgactttgagtgtcagtggaaagatgatgaaggaaattataaaacagtacttatgttgcaaaaagaaaatctccctggtagaagagctcaacgtgatagaagggctgcaggaaacaggcatattgaaaatcagcttggagtaagctttcagtcacatctccctgaactgcagcaatttcaacgtgaagggaaaatttatgaatacaatcaagttgagaagtctcctaataatcgaggaaaacattataaatgtgatgaatgtggcaaggtcttcagtcaaaactcacggctaacaagtcataagagaattcatactggagagaagccttaccagtgtaataagtgtggcaaagcctttactgttcgttcaaacctaacaatccatcaggtcatccatactggagaaaaaccttacaaatgtaatgaatgtggaaaggtcttcagtcaaccttcaaaccttgcaggtcatcagagaattcatactggagagaaaccttacaagtgtaatgagtgtggcaaagcctttagagcacattcaaaactaactacacatcaggtcatccatactggagaaaaaccttacaaatgtaaggaatgtggcaagtgcttcactcaaaattcacaccttgcaagtcatcgaagaattcatactggggagaagccttacaagtgtaatgagtgtggcaaagcctttagtgttcgctcaagcctgactacccatcagacaatccacactggagaaaaaccttacaaatgtaatgaatgtggcaaggtcttcaggcacaattcataccttgcaaagcatcggcgaattcatactggtgagaaaccttacaagtgtaatgagtgtgggaaagccttcagtatgcattcaaacttaactaagcatcagatcatccataccggagaaaagcctttcaaatgtaatgaatgcgtcaaggttttcactcagtattcacacttagcaaatcatcgaagaattcatactggagagaaaccttacaggtgtgatgagtgtggcaaagcctttagtgtgcgatcaagcctaactacccatcaggcaattcatactggagaaaagccttacaaatgtaatgactgcggtaaggtcttcacacaaaattcacaccttgcaagtcatcggggaattcattctggagagaaaccttacaagtgtgatgaatgtggtaaagccttcagtcaaacatcacaacttgcaaggcattggagagttcatactggagaaaaaccttacaagtgtaatgagtgtggcaaagcctttagtgttcattcaagcctaactatacatcagacaatacatactggacaaaaaccatacaaatgtaatgattgcggcaaggtcttcagacacaattcgtaccttgcaattcatcagagaattcacactggtgagaaaccttataagtgtaatgagtgcggcaaagcatttagtgtacattcaaacctagctacccatcaggtcatccatactggagaaaaaccttacaaatgtaacgaatgtggcaaggtcttcactcaaaactcacatcttgcaaatcatagaagaattcacactggagaaaaaccttataggtgtaatgagtgtgggaaagccttcagtgttcgttcaaccctaactacccatatggcaatccatactggagacaaaccttacaaatgtaaccaatgtggcaaggtctttactcaaaattcaaaccttgcaaaacatcgaagaattcatagtggatagaaaccttacaaaggacgccgggcgtggtggctcacgcctgtaatcccagcactttgggaggccgaggcagggggatcacctgaggtctcgagttcgagaccaggctggccaacacggtgaaacgctgtctctactaaaaatacaaaaattagctgggtgtggtggtgcacgcctgtaatcccagctactcgggaggctgaggcaggagaatcacttgaacctgggaggcggaggttgcagtgagcgagatcatgccattgcactccagcctggacaacaagagtgaaactccatctccaaaaaaaaaaaaaaaaaaaagtaaccttacaaaggagtgcggccagtttctcagctacaaattctttcacaacatcagagaattcattcttgagacaattcttacaaatacggtgactgtggcaaactcctgatgagtttaagcattaacagacatcagagttcaaatcctgtgaatatactatgtatgacagaagctttatccaggtctcagagctcaataggcatcaaaagatgcatctttgatgaagtcacacaaacgtaacatgcatgctgagactgttactcctggaccacaactgtaggtgaggattcataggaagagtagaactcagtctctagtttcctcataaccctctgatattatatacttcagcataatcagaagtccaaatgtgttaaaactcattacatgatacatatcaaaggttgtaggatgtttggaaatggccaattactttcagcttataaaatgttttgttgaagtatttaagatttattgaaaaggctactatttataacttccaaccagaactttgcaatgtgctgattttatacatgattatatgcctaacatggtgttgttcgggaaagaatcaaaggatggaagggctcactcacttcattaggtgaggattatttctctccaagctcctgaagaagaaagactctgccttttaaaattaaatatagtctgaattagagagcacttggaaagggcagaggatgatgaactatgatgtcacttatcatccttattgcactgcaggtgcccttcttctgacagaagagcactgtgggtatgggaagaaattctctactggccgggcacagtggctcacgcctgtaatgccagcaccttggcctgccaaagtgctgggattacgggctggagccaccgtgcccggccggccgagcataagaagtttaatcaaagtaaccagaatcccatgtttgttactaggatttacattaactgctggaatcacattttgctactatttaagaatgcatcatagatttaatgttttaactaataaaatttgatgtattttataaaaaaaaaaaaaaaaa

SEQ ID NO: 57438 - DNA, 1074 bp, Homo Sapiens
gcaggtaggtggacggagagatagcagcgacgaggacaggccaaacagtgacagccacgtagaggatctggcagacaaagagacaaggtgagaaggagactttggaagtgacccaccatggggctcagcatctttttgctcctgtgtgttcttgggctcagccaggcagccacaccgaagattttcaatggcactgagtgtgggcgtaactcacagccgtggcaggtggggctgtttgagggcaccagcctgcgctgcgggggtgtccttattgaccacaggtgggtcctcacagcggctcactgcagcggcagcaggtactgggtgcgcctgggggaacacagcctcagccagctcgactggaccgagcagatccggcacagcggcttctctgtgacccatcccggctacctgggagcctcgacgagccacgagcacgacctccggctgctgcggctgcgcctgcccgtccgcgtaaccagcagcgttcaacccctgcccctgcccaatgactgtgcaaccgctggcaccgagtgccacgtctcaggctggggcatcaccaaccacccacggaacccattcccggatctgctccagtgcctcaacctctccatcgtctcccatgccacctgccatggtgtgtatcccgggagaatcacgagcaacatggtgtgtgcaggcggcgtcccggggcaggatgcctgccagggtgattctgggggccccctggtgtgtgggggagtccttcaaggtctggtgtcctgggggtctgtggggccctgtggacaagatggcatccctggagtctacacctatatttgcaagtatgtggactggatccggatgatcatgaggaacaactgacctgtttcctccacctccacccccaccccttaacttgggtacccctctggccctcagagcaccaatatctcctccatcacttcccctagctccactcttgttggcctgggaacttcttggaactttaactcctgccagcccttctaagacccacgagcggggtgagagaagtgtgcaatagtctggaataaatataaatgaaggaggggc

SEQ ID NO: 57439 - DNA, 3208 bp, Homo Sapiens
agcgggctctcgcctctcctgcaccctcagccggcgcgcttctcttatgggcgtctgctgcagtctggctgcggtcgaactgaaagcggcggcgggagaccaaacttagaccccgctgtggactagagaactcagagaaggcagagggagagggagagagagagagagaagggacccgaggaggaggcttccatcacgtcattgcaggatgttctggaagctttccctgtccttgttcatggtggcggtgctggtgaaggtggcggaagcccggaagaaccggccggcgggcgccatccactcgccttacaaggacggcagcagcaacaactcggagagatggcagcaccagatcaaggaggtactggcctccagccaggaggccctggtggtcaccgagcgcaagtacctcaagagtgactggtgcaagacgcagccgctgcggcagacggtgagcgaggagggctgccggagccgcaccatcctcaaccgcttctgctacggccagtgcaactccttctacatcccgcggcacgtgaagaaggaggaggagtccttccagtcctgcgccttctgcaagccccagcgcgtcacctccgtcctcgtggagctcgagtgccccggcctggacccacccttccgactcaagaaaatccagaaggtgaagcagtgccggtgcatgtccgtgaacctgagcgactcggacaagcagtgagcgccgggcaggacgcagctcagccccgcgcgcgcccggcagctgggtggcgccgccgccgcctctgtccctgccctccgagcccactgtcacgctgcctggtgttccccatcagcagcaagcacttctcttagggctgacggtgtccttgtcacagacgtggatcgcaagtggagcttttgctgatgtgttcctgaccgaccccgggtcccacctgtgcccctaaaccaggcggtggatcaggcccgaaggaaaatgctggaaaaccaccaccgccaccgagcagtcagagaggacctttcgaggtgatgcactgtaaatccggcattgatgtttccgccatgtggaaaagcaaggatttccctggccccgccctgcactccagctcgcccctttcccgcgcgaagtgaaggatgcgtcacttttctgagcggcccctcagacctctcctgctggtccctggacctcttgctgggagcgctcattcttgtgactggcaggctgccctcggtcgctgctgtgatgaggatatgtgcaacctccataaatatgtcggtggacggggcgtctcctaataaacctgataccaagaagacaacttgagccacttggatcccgaagtgggcttcccgggaaacctcgagcagagcaggctacacaatcccccatcctcaagtccccaccgcctcttcttcctcactgtccccgccccctatttgtggactaaagatgaactctggtgtgcatgctattattgctgcaattagaatattatcacacacaaaggtctctatattaacgctggttttataagtgaccgtatattgtaaagagctgttaaaaagtattatagacctattcatgtattatttcacatgttttgactctggcttgcagcaccattcggagtaaggatgacagcaggcccagaaggtgttttactcagaaaaaaaaatgcctggtcagcaattcactgtcatgcacctatttttagattgggcagggagatgggaggagtcgtgatttttactttgaatactatttcactgacgttactaagtattgcagcacaatgtagaaattggcttgggatggataggtatagggaagggcattcgttgggaaattgatgaccggaaactagaaagcccctataatgtggaatatgcatatgtggggtgaaaccgtatactactttcactgccatgacactaggcaaaaaatatttcctgttaaaagaaagagaaaaagaaagggatattgaaaaatataaggagttgagtcgctttgtggtatagaagggagtaaggaataaaagatatagaatagtaatctagttgaactgttctgcacaaaacatgcttccttttcaaagaatagacttcaaaagggacgaacaaacattaggtcaccttttgtgtttataatgaattgttgacgtttccatgctgtggtctcttgatatacggaagtagacgtaacttattttccagcgaaattatatacttcttctgggctcctttgctcagttgccccaggaaggcttccctgtgagtaatgcttatggaatctgacaaatgtgaatgagctgccattggtgggaatcagtaaactttgaaaacctttcactgatgattccctggtaagtgctcctgtgaggggccacttccctagtatgtgagagagaccctctgcaagccgctgtggggacttagcttcctgatactaggtagtgatggtggatctagagacattcacttgaagagcaaggattggggtggggtgggttggtgaatctatctcaggccactgcactgcaaggtgcatttctgtcatttctgcaacaccatgagacctgagcaagaatgtgctgtggcagagggggtcttggtttcataaatgggtatatacagcctgaactcaggaggcagaaatcaaaagaaatccttgagggctggaacctgaggatagagcgaaaatggagagaagggtgttcaaggtcaggagtgatttttgcatttggtggaaaacctcaagtcagactcagtggcagaacatgcagcagaaaagctgtgaaggaaggaaatttacgtgattgtaatggaggctaggggtggattgggaggtgagtggaggagagtctctgaccagctgcaaagccaacccctatcattttattaacatggaacccacacagataggggagggattaagctaagaacttacagaatgcaaacacgagcacactctcttcgaacccaattgtgggtgtagcaatgaaagcaatatgatatgctgcagtgtgaagctccttctggggttatcgtatgtacaaagtttaccttataatggctcaaattgtatttaatttttttgttttgtttataaatgaagaaaagctataagtataatgtaattattttataggtatactattaaattatagaacaaataaagataatctaggattatatgcgaaaaaaaaaaaaaaaa

SEQ ID NO: 57440 - DNA, 3008 bp, Homo Sapiens
gtgatctgggaggtgctgagcacccacctgcgacccatggcgggggaggaccgagtaacgacagcatggcggtgcccccgagagggaggggcatagaccccgcccggacaaaccctgacacgttccctccttcaggggcgcgatgtatggaacccagtcctgagaggcctgcatgcagtcagcaggagccgaccctgggaatggacgcgatggcctcggaacacagggatgtccttgtgctgctgcccagccgggagcaactgcggctggccgtgggggtgaaggctactggccgcgagcttttccagcaagtgtgcaacgtggcgagcatcagagacgcgcagttctttggcctctgtgtggtcagaaacaatgagtatatatttatggatttggagcaaaagctcagcaagtacttctcaaaagattggaagaaagaaagaaatgaaggaaatgagaaacccagagcccccttcgtggccttcctccgagtgcagcactacgtggaaaacggaagggtcataagcgaccacagggcacggcacctgtactactgccacttgaaggagcgcgtgctgaggtcacagtgcgctcaccgggaggaagcctacttcctgctggctgcctgcgcgctgcaggctgacctgggcgagcaccgggagtcggcccatgccgggaggtacttcgagccacactcctacttcccacagtggatcatcaccaagagggggattgactacatcctccggcacatgcctaccctgcaccgtgagcgccagggcctgagccccaaggaggccatgctgtgcttcatccaggaggcctgccggctggaggacgtgcccgtgcacttcttcaggctgcacaaggataagaaggaaggtcgtcccaccgtgatcctgggactggccctcaggggagtgcacatctaccagggaaagaagctggagatccagctggatgggctgcccgcagcacagaagctggtttactacacggggtgcacctggcggtccaggcacctgctgcacctgctgcgcgccagccaccagctccacctccgcgtgcggcccactctgcaacagctgcggcagcgggaggaggcagaagagaagcagcactaccgggagtcctatatcagcgatgagctggagctggacctggccagcaggagcttcccgggcagtggggtcagcagccagcactgcccccactgcctctcacgccactccgccgacagccacggcagttcctacacgtcaggcatcaaggccaactcctggctcagggaatccagagagatgtctgtggacgtgcccttggaggtccacgggctccatgagaaggagccgtcctccagccccaggaccagccgcagccaccccagcacacgtggtgacagccaagccactcgtcaggagccctgcaccgaggtcaggaccagaggccagagcgccgaggccgtgcaccagatccaggaaatgacagccggggtcagtgaggagcagcacagccatggcctggatgacatgcagctgcaccagctggccctgcacccagcgcccacctcactcagccataccttccaccgcgccctggactgcaggctggcaggcccctgcgagaccagggccactctccccagcaagaggtccagcaactgtctcgccctggacctgttcggagaggccccaccacaggagtttgtggtgtaggcaccacccacccagcagtaccgtccgcaccgccaggctcagcccctgcccaccccacttccacatggccctcgtcccttcctgcccgccagatgctgcctgcacttccgcagccagcacgctccacaggttcacctgtaagaggtgtggagctggctctgacatcaacctgggaggtaacaaacaggtcccgcacctcatgcctgtctgccatacacccgggagctctttccctcagggtctcagggagccagttcaaggtctggctgtcaagtgtccagagagccatggtgttggcccctgaggcagcctgtcacccatcctaatctgggagagaaggtgacacagctgggcccagaccctggagagacagctctgcagtttcccacactgtcagctccccaagagacagtcctgatgggcacaggctgccagagctcccaagccggagttcacagttatcatcactgtgcaggacccaggttcctcccagacctgaatccctctctgcaactcctgtttgcaagcgctgggcctgccagacagaggcccctcttgtggtgcaagcccagctctgtcacctgagatccagccagagaccctcctccaccatccacagtcaatggctgtgctttcccttccaagccagggcttccaaagaccccactgccccggagctgaagccgactctgctcccatctcagccatgaggcctcaggacccactctgctcacaggtggcttccttaagccattgccctggctggggttgggctggtgcagcccagctggcggaggggcgaagctttggtgacagacggagagtgggggactagctgtgcatggcacctgctctgatccggtgggctccacgggtagtgcgacctcggttctgtgggctctggaaggccaccagggtagggtctccccagggctcctccccctgcacaacactcctgcacacgtgcaaacctgctgtcctctgcatttacaggaatggcccgtgcatccctgctagtctcaggcccatcccagagcactgagaggccacaatcgttcagccctgtgccctgaacaccactgcccccttcactgtctgtgtgtggtgaagaccacgccacaccaccctccagctcactggagacaagcatgagcttgagccccatggcctggtgcagggctgcgtgcattgaggccgcctctttgacgggtccatccagggggaccctctcctttctgtgaaagggaatcgtgtgtgtgccccaggcacgtgtaataaagaacccgagcagat

SEQ ID NO: 57441 - DNA, 2658 bp, Homo Sapiens
atacgcatgcgtgcacgctgccggtcgggctgggctgagaggggagggggcggcggcggccgaggcggcgtcgttatttccgtggtccggacagtgcgtggcggcgcgggtgaccacgggagaagtaggcataatggttatgaaagcttctgtagatgatgacgattcaggatgggagctcagtatgccagaaaaaatggagaaaagcaatacaaactgggtggacattacccaagattttgaagaagcttgtcgagaattaaagttgggagaactacttcatgataagctatttggtctttttgaagccatgtctgctattgaaatgatggatcccaagatggatgctggcatgattggaaaccaagttaatcgaaaagttctcaattttgaacaagctatcaaggatggcactattaaaattaaagatctcaccttgcctgaactgatagggattatggatacatgtttttgctgtttgataacgtggttagaaggccattcactggcacagacagtatttacgtgcctttacattcataatccagactttatagaagatcctgctatgaaggcttttgctctgggaatcttgaaaatctgtgacattgcaagggaaaaagtaaataaagctgctgtttttgaagaggaagattttcagtcaatgacttatggatttaaaatggctaacagtgtgacagatcttcgagttacaggcatgctaaaagatgtggaggatgacatgcaaagaagagtaaagagtactcgaagtcgacaaggagaagaaagagatccagaagttgaactagaacaccaacaatgtttagcagtattcagcagagtgaaatttactcgtgtgttactgacagtgcttatagcctttactaagaaagagaccagtgctgttgcagaagctcaaaaattgatggttcaagcagcagatcttctttctgccattcataattcattgcatcatggcatccaggcccagaatgatactacaaaaggagatcatccaattatgatgggttttgaaccccttgtgaaccagaggctacttccacctaccttccctcgatatgcaaaaataattaaaagggaagaaatggtgaactattttgcaagattaatagatagaataaaaactgtctgtgaggttgtgaatttaacaaatttacattgtatcctggattttttctgtgaatttagtgaacagtcaccatgtgttctttcaagatctctgttacaaaccactttcctggtggataacaaaaaggtctttggaactcatctcatgcaagacatggtgaaagatgcacttcggtcttttgtcagtcctccggtgctttcccccaagtgctacctatataataatcaccaggctaaggactgtatcgactcctttgttactcactgtgttcggccattctgtagtcttattcagatccatggacataacagggctcgacagagagataagcttggtcatattcttgaggaatttgccaccttgcaggatgaggcagagaaggttgatgcagcgcttcacaccatgctgttgaaacaggaaccccaaaggcaacatttggcctggttaggtacctgggtcctttaccataaccttcgcattatgatacagtaccttctaagtggctttgaattggaactctacagtatgcacgagtactattacatatattggtatctctctgaattcctttacgcatggttgatgtcaacattgagtcgtgccgatggctctcaaatggcagaggaaaggataatggaagagcagcagaaaggccgtagtagtaaaaaaacaaagaaaaaaaagaaagttcgcccattgagccgagagatcacaatgagccaagcatatcagaacatgtgtgctggaatgtttaaaaccatggtagcatttgacatggacggcaaagtacgtaaaccgaagtttgagcttgatagtgaacaagttcggtatgaacacaggtttgctccattcaacagtgtgatgaccccgccgccagtgcactacttacagttcaaggaaatgtctgacctcaataaatatagccctcctcctcagtctcctgaactgtatgtggcagctagtaagcactttcaacaggcaaaaatgatattggaaaatattcctaacccggaccatgaggttaatagaattttaaaggttgccaaacccaactttgtggttatgaagttattggcaggaggacacaaaaaggaatctaaagttcctcctgaatttgatttctctgctcataaatattttcctgttgtgaaacttgtttgagagagactggggaggtggccataaaggggcagagtcttctttcagacccaactcttagagggcacatcaccaggctccacatcacgggaagtgagatggatttcttgggtaacaactcattataaggaatacttttagtttgacagccttatatgacatgaatgaaaactgctgttttaaagtggtttattatgttccatggaagaaactggtcttattgaatgcattgatgaacgttatatggttttattacagatttaatcacaaatcattttttatgaatgattgagtgaaaatagtgtttataaaggttaataaatttcttgacaaaaaaaaaaaaaaaaaaa

SEQ ID NO: 57442 - DNA, 2048 bp, Homo Sapiens
ctctgcaacagccgcgcttcccgggtcccgcggctcccgcgcgcgatctgccgcggccggctgctgggcaaaaatcagagccgcctccgccccattacccatcatggaaaccctccaggaaaaagtggccccggacgcgcgagcctgaggattctgcacaaaagaggtgcccaaaatgaagaccctgatgcgccatggtctggcagtgtgtttagcgctcaccaccatgtgcaccagcttgttgctagtgtacagcagcctcggcggccagaaggagcggcccccgcagcagcagcagcagcagcagcaacagcagcagcaggcgtcggccaccggcagctcgcagccggcggcggagagcagcacccagcagcgccccggggtccccgcgggaccgcggccactggacggatacctcggagtggcggaccacaagcccctgaaaatgcactgcagggactgtgccctggtgaccagctcagggcatctgctgcacagtcggcaaggctcccagattgaccagacagagtgtgtcatccgcatgaatgacgcccccacacgcggctatgggcgtgacgtgggcaatcgcaccagcctgagggtcatcgcgcattccagcatccagaggatcctccgcaaccgccatgacctgctcaacgtgagccagggcaccgtgttcatcttctggggccccagcagctacatgcggcgggacggcaagggccaggtctacaacaacctgcatctcctgagccaggtgctgccccggctgaaggccttcatgattactcgccacaagatgctgcagtttgatgagctcttcaagcaggagactggcaaagacaggaagatatccaacacttggctcagcactggctggtttacaatgacaattgcactggagctctgtgacaggatcaatgtttatggcatggtgcccccagacttctgcagggatcccaatcacccttcagtaccttatcattattatgaaccttttggacctgatgaatgtacaatgtacctctcccatgagcgaggacgcaagggcagtcatcaccgctttatcacagagaaacgagtctttaagaactgggcacggacattcaatattcacttttttcaaccagactggaaaccagaatcacttgctataaatcatcctgagaataaacctgtgttctaaggaatgagcatgccagactgtaatcccaggtattcactgcatcagacaccgagacactgaacttcctgagccaccagacaggaaagggtagcagaaaacagcttcactcctcaggaagtaccatggacagacgcctaccaggggtgacaaagcagtgcagttggattgtaaggaaaaattccggaattaatgcatcctaatgaatgttgtccccttcaatggtgttaccttaggagctgaacattcaattcagttacaccactatgactaaaaacagtttggatctcttagtattgcctttgaaactgcaacataagcaactcaacaatattagttgcattcctttatagacataccatgtcaaagacgtttttctatcaagttgtattctttcctgttctataacctttgtcatctgttagactctgtatgtgtgatttgtaaaaagcaggctgaaactatggacatgatttctgaagagcacatctccactgactttcataaagcaaatgtccaatatttatttattgagagttttttagtgcaatctgggccagtatttttatagattatgattatgtggtaatttatccttcctaactctttaatcctgaatgatggttggaaatggcctagaattaggttactctgttcacaatgctcattgttagcatgcaattggtatttgacttggaagtgttgtgttgtattttttgaacccctaggcttcaggaaaactgctcttttgtaaaaagaatagcgatgacattttctaatgtgcagaaatgttccaaaaggacaaaattgaaaaccaaaaactatgttattaaaacaaaaaaatgctaaaaaaaaaaaaaaaaaa

SEQ ID NO: 57443 - DNA, 1710 bp, Homo Sapiens; identical to SEQ ID NO: 30844

SEQ ID NO: 57444 - DNA, 3490 bp, Homo Sapiens
gccttccgcaaactcctgacctgtgggtccatccgttcaacggccaaaggctggcggaggagggatcccctgcctttctcggaacggaacggagcagagtcgtgcgtggttgagtttagataaaagccgagtgagcgcgctctgttccttaagattagtttaaggtgccttggattgctctgaagagctttgaccacctgatattgcttacatctggaacttcttggcttctcattccccagatgtgcgggtcagagaggattctacaggcaggaaacatcttagaaatcagggttgggcaggcaggagccaggagagtagctacaatgacttcaccagtactggtggacatacgagaagaggtgacctgccctatctgcctggagctcctaacagaacccctgagcatagactgtggccacagcttctgccaagcctgcatcacaccaaatggcagggaatcagtgattggtcaagaaggggaaagaagctgccctgtgtgccagaccagctaccagccagggaacctgcggcctaatcggcatctggccaacatagtgaggcggctcagagaggtagtgttgggccctgggaagcagctgaaagcagttctttgtgcagaccatggagaaaaactgcagctcttctgtcaggaggatgggaaggtcatttgctggctttgtgagcggtctcaggagcaccgtggtcaccacacgttcctcgtggaggaggttgcccaggagtaccaggagaagtttcaggagtctctaaagaagctgaagaacgaggagcaggaagctgagaagctaacagcttttatcagagagaagaagacatcctggaagaatcagatggagcctgagagatgcaggatccagacagagtttaatcagctgcgaaatatcctagacagagtggagcaacgggagctgaaaaagctggaacaggaagagaagaaggggctacgaattatagaagaggctgagaatgatctggtccaccagacccagtcgctgcgagagctcatctcggatctggagcgtcgatgtcaggggtcaacaatggagctgctgcaggatgtgagtgatgtcacagaaaggagtgagttctggaccctgaggaagccagaagctctccctacaaagctgagaagtatgttccgagccccagatctgaaaaggatgctgcgagtgtgtagagagctgacagatgtccaaagctactgggccatccaggggtctttaaccagaagagagaggagagcctcaggagttaggaccagaagaagccagggaagcagtgcaatggcttcaaaaatcttgcttaacgtacaagaggaggtgacctgtcccatctgcctggagctgttgacagaacccttgagtctagactgtggccacagcctctgccgagcctgcatcactgtgagcaacaaggaggcagtgaccagcatgggaggaaaaagcagctgtcctgtgtgtggtatcagttactcatttgaacatctacaggctaatcagcatctggccaacatagtggagagactcaaggaggtcaagttgagcccagacaatgggaagaagagagatctctgtgatcatcatggagagaaactcctactcttctgtaaggaggataggaaagtcatttgctggctttgtgagcggtctcaggagcaccgtggtcaccacacagtcctcacggaggaagtattcaaggaatgtcaggagaaactccaggcagtcctcaagaggctgaagaaggaagaggaggaagctgagaagctggaagctgacatcagagaagagaaaacttcctggaagtatcaggtacaaactgagagacaaaggatacaaacagaatttgatcagcttagaagcatcctaaataatgaggagcagagagagctgcaaagattggaagaagaagaaaagaagacgctggataagtttgcagaggctgaggatgagctagttcagcagaagcagttggtgagagagctcatctcagatgtggagtgtcggagtcagtggtcaacaatggagctgctgcaggacatgagtggaatcatgaaatggagtgagatctggaggctgaaaaagccaaaaatggtttccaagaaactgaagactgtattccatgctccagatctgagtaggatgctgcaaatgtttagagaactgacagctgtccggtgctactgggtggatgtcacactgaattcagtcaacctaaatttgaatcttgtcctttcagaagatcagagacaagtgatatctgtgccaatttggccttttcagtgttataattatggtgtcttgggatcccaatatttctcctctgggaaacattactgggaagtggacgtgtccaagaaaactgcctggatcctgggggtatactgtagaacatattcccgccatatgaagtatgttgttagaagatgtgcaaatcgtcaaaatctttacaccaaatacagacctctatttggctactgggttatagggttacagaataaatgtaagtatggtgtctttgaagagtctttgtcctctgatcccgaggttttgactctctccatggctgtgcctccctgccgtgttggggttttcctcgactatgaagcaggcattgtctcatttttcaatgtcacaagccatggctccctcatttacaagttctctaaatgttgcttttctcagcctgtttatccatatttcaatccttggaactgtccagctcccatgactctatgcccaccaagctcttgaattttctcatttcttcacctacaaccctttgtctcgacttatctcctgcaactgactcatctgcaacattcacaccattgcttccttgtggtttcccttctttagaacttttactcatccttgagatgtatggtgtatttggcttgagttatgagagatgcttatttattcatttactctttttcatattttcagagaaagttacctaatccctcctaaagacacagcagtatgggtataacatccttgccttcccatttatccatgtttcactttatcactgatgtgaagaggcccaaagcctgttagccaccatccatgctacctaggtagtccataggaaccacccccatgaccaccaccaacatcaactaaaggttcttggagggtatgtcagtgtgttgctcaggataccccaggtacatcaaggaatcaaggagaggaaaatatgagcaatatgtgtattcagagtgaagattttatgtccagagtatttgagctcaaaccttgcctgttgttttctaatcatgatgaatactttctcagtttctttttcctgaaatataaattgggatttaagactgtacctaactattaagatcactgtgtaaaactaagtgtctctaaatgtaatgcatcgatttagtgtctggaacataataaatatttgctctcatgattgctaaaaaaaaaaaaaaaaaaaaaaaaaaaaaaaaaaa

SEQ ID NO: 57445 - DNA, 715 bp, Homo Sapiens
ttaccatatcagattcacattcagtcctcagcaaaatgaagggctccattttcactctgtttttattctctgtcctatttgccatctcagaagtgcggagcaaggagtctgtgagactctgtgggctagaatacatacggacagtcatctatatctgtgctagctccaggtggagaaggcatcaggaggggatccctcaagctcagcaagctgagacaggaaactccttccagctcccacataaacgtgagttttctgaggaaaatccagcgcaaaaccttccgaaggtggatgcctcaggggaagaccgtctttggggtggacagatgcccactgaagagctttggaagtcaaagaagcattcagtgatgtcaagacaagatttacaaactttgtgttgcactgatggctgttccatgactgatttgagtgctctttgctaagacaagagcaaatacccaatgggtggcagagctttatcacatgtttaattacagtgttttactgcctggtagaacactaatattgtgttattaaaatgatggcttttgggtaggcaaaacttcttttctaaaaggtatagctgagcggttgaaaccacagtgatctctattttctccctttgccaaggttaatgaactgttcttttcaaattctactaatgctttgaaatttcaaatgctgcgcaaaattgcaataaaaatgctataaacca

SEQ ID NO: 57446 - DNA, 785 bp, Homo Sapiens
agctaatttaaggctggacacagagtcagcaacacacaagacatcatcttgaaggaaggatggctttggccagaccaagaccgagacttggagacctgattgagatttctcgctttggctatgcacactgggccatctacgtgggagatggctatgtggtccatctggctccggcaagtgaaattgctggagctggtgcggccagtgtcctgtctgccctgaccaacaaagccatagtgaagaaggaactgctgtctgtggtggctgggggagacaactacagggtcaataacaagcacgatgacagatacacaccactgccttccaacaaaatcgtcaagcgggcagaggagttggtggggcaggagttgccttattcgctgaccagtgacaactgcgagcacttcgtgaaccatctgcgctatggcgtctcccgcagtgaccaggtcactggtgcagtcacgacagtaggtgtggcagcaggcctgctggctgccgcaagccttgtggggatcctgctggccagaagcaagcgggaaaggcaataaatccaagaaattgtcccaacaaccaccaattcttacggaggaatattatttagccagcaggagtggagtttggtttactgattttactgttttgtgttcatgaatctttattttaatggagttaaaagcacaggaaaatgtatttggaaatgcagcttagtatgaattctattaaagacacaattgggctctgcaaaaaaaaaaaaaaaaaaaaaaaaaaaaaaaaaaaaaaaaaaa

SEQ ID NO: 57447 - DNA, 2253 bp, Homo Sapiens
gtgcagcggcggccgcttggaagatggctgcgccctgtggctcggagctgcccgccaactcgccgctaaaaattccgaagatggaggtgctttccccggcttctcctggtggcctgagcgacggaaatccatcgctgtccgacccttccacgcctcggggtgcctccccgctcgggccgggcagtgcggcgggctcgggggcagcggcgtccgggggtctcgggctggggctggggggccgcagcgccgcctcgtcctcggtctccttctcccctggtggcggcggtggcggggctgcggcagccgccgccgccgcctgccggggcatgtcgtggacgccagccgagacgaacgcgctcatcgcagtgtggggcaacgagcggctggtggaggcgcggtaccagcagctggagggagccggcacggtgttcggcagcaaggcccccgggccagccatgtacgagcgcgtgtcccgggccctggccgagctgggctacgagcggaccccgtcccagtgccgggagcgcatcaaggagctggagtcagatggcagcactatggaggactattcacaggaggactggggaaaccacagtcaggatctccatggctatccaacagatcaggaattggatgaaatacctgtcacaaagagaacattaaaaataaaacaagagtcttctgaagaagcacagaagagagacatcatgcagaatattgtacagattttggaatcggtacagttgaaatgggaactttttcagagctggacagacttttcaaggctccatctttctaataaactggccatttttggaattggttataacacccgttggaaagaggatatccgttaccattatgctgagatcagctcccaggtgccccttggcaagcgacttcgggagtacttcaactctgagaagcctgaaggacggatcattatgacccgagtgcagaaaatgaactggaaagatgtttactacaaatttttagagatcactattagcaaagctaggtgcttggagctgcacatggaaattgactggatacccattgcccactccaaaccaactggtgggaatgttgttcaatatttattgcctgggggtattcctaaaagcccaggcctttatgccattggctatgaagaatgtattgagaggcccctctcaccacacatggagcaaagttccctggacccaggaaaagagggccgggttgacctggaaaccctttcagcacaagcctcattacaggtggaaatagaacccacccgaattatctattgctacctcgggattgctgaggtcaggactctacagcagtgcttatttttacatttccaagcgaataccaaaaccttcagcaaagattgggttggtattaacgggtttttgtctcagaactgtattgtggatcccggagtttcccccaaatccatctacatcaaatttgtagaagtagagagggattttctttccgcaggctctttagttgagtgcctggaaaaagccattggataccccttaaaatttaacaactgaatgtcatccttcataaggatttgggctcttagctccttcttctctactcacttcccattacccggaccacccctcatccagatgccgccgtcagactcttcatggaaaccctttcttcaattgggccagtacgacttctaaggaatcatagtagacttgggccagaaaaaacagacctcacctgaaaatgctcattttgagcaagcaagatatatagcgaacttgcatggtgggtcagctatttcttttttaaaaacagaaaaacaatttttaaatggattttagagccctaatataaacaaatgtaggtacattccatattggacaaaacttatactttgagtttcatatgaaattgaaaaattgtatttttttcacaatgtttcatttttacacatctctatgtctctatataagtaatatttacaaccctgaataaataagcaatagataatggcaagttaaatcttgattcacagttaaaaagactttttcaatatcacccttagctactattgtatataatttagattttcatttttttcaccagccaagtgttttgctatttccaatcagtattgcttgcagagacctttgtttctgtgatgtaccaactttacagttgtgttgccatttaaacctttttttaaaaaaaaaaaaattaaagtaattcctggccaaaaaaaaaaaaaaaaaaaaaaaaaaa

SEQ ID NO: 57448 - DNA, 3890 bp, Homo Sapiens
gcacctgggcacctgggcagccgccgcggcgctggctagacgtgcgcgatggagggcgacggcgggaccccatgggccctggcgctgctgcgcaccttcgacgcgggcgagttcacgggctgggagaaggtgggctcgggcggcttcgggcaggtgtacaaggtgcgccatgtccactggaagacctggctggccatcaagtgctcgcccagcctgcacgtcgacgacagggagcgcatggagcttttggaagaagccaagaagatggagatggccaagtttcgctacatcctgcctgtgtatggcatctgccgcgaacctgtcggcctggtcatggagtacatggagacgggctccctggaaaagctgctggcttcggagccattgccatgggatctccggttccgaatcatccacgagacggcggtgggcatgaacttcctgcactgcatggccccgccactcctgcacctggacctcaagcccgcgaacatcctgctggatgcccactaccacgtcaagatttctgattttggtctggccaagtgcaacgggctgtcccactcgcatgacctcagcatggatggcctgtttggcacaatcgcctacctccctccagagcgcatcagggagaagagccggctcttcgacaccaagcacgatgtatacagctttgcgatcgtcatctggggcgtgctcacacagaagaagccgtttgcagatgagaagaacatcctgcacatcatggtgaaggtggtgaagggccaccgccccgagctgccgcccgtgtgcagagcccggccgcgcgcctgcagccacctgatacgcctcatgcagcggtgctggcagggggatccgcgagttaggcccaccttccaagaaattacttctgaaaccgaggacctgtgtgaaaagcctgatgacgaagtgaaagaaactgctcatgatctggacgtgaaaagccccccggagcccaggagcgaggtggtgcctgcgaggctcaagcgggcctctgcccccaccttcgataacgactacagcctctccgagctgctctcacagctggactctggagtttcccaggctgtcgagggccccgaggagctcagccgcagctcctctgagtccaagctgccatcgtccggcagtgggaagaggctctcgggggtgtcctcggtggactccgccttctcttccagaggatcactgtcgctgtcctttgagcgggaaccttcaaccagcgatctgggcaccacagacgtccagaagaagaagcttgtggatgccatcgtgtccggggacaccagcaaactgatgaagatcctgcagccgcaggacgtggacctggcactggacagcggtgccagcctgctgcacctggcggtggaggccgggcaagaggagtgcgccaagtggctgctgctcaacaatgccaaccccaacctgagcaaccgtaggggctccaccccgttgcacatggccgtggagaggagggtgcggggtgtcgtggagctcctgctggcgcggaagatcagtgtcaacgccaaggatgaggaccagtggacagccctccactttgcagcccagaacggggacgagtctagcacacggctgctgttggagaagaacgcctcggtcaacgaggtggactttgagggccggacgcccatgcacgtggcctgccagcacgggcaggagaatatcgtgcgcatcctgctgcgccgaggcgtggacgtgagcctgcagggcaaggatgcctggctgccactgcactacgctgcctggcagggccacctgcccatcgtcaagctgctggccaagcagccgggggtgagtgtgaacgcccagacgctggatgggaggacgccattgcacctggccgcacagcgcgggcactaccgcgtggcccgcatcctcatcgacctgtgctccgacgtcaacgtctgcagcctgctggcacagacacccctgcacgtggccgcggagacggggcacacgagcactgccaggctgctcctgcatcggggcgctggcaaggaggccatgacctcagacggctacaccgctctgcacctggctgcccgcaacggacacctggccactgtcaagctgcttgtcgaggagaaggccgatgtgctggcccggggacccctgaaccagacggcgctgcacctggctgccgcccacgggcactcggaggtggtggaggagttggtcagcgccgatgtcattgacctgttcgacgagcaggggctcagcgcgctgcacctggccgcccagggccggcacgcacagacggtggagactctgctcaggcatggggcccacatcaacctgcagagcctcaagttccagggcggccatggccccgccgccacgctcctgcggcgaagcaagacctagctggctgcctgcggagaccgggggtccacgtggggctcttgtcctgtcctgtgttcctcgtggggatggaacgatcctgcgtggggccctgttgtggcttacctaaatgttaaccaagcagaggtgacatggtgccatcaggaggcggctgctgctgaccggagtgtcccctccaggtgaagctggctcaggtgcacatgcccgctccatcatcgatctaggcacctgctgtctgaagggaccgtgggtcagaatcatttcgttgtgctcctaatgggtcgctgaggctggtctctcagtgatgaagccccaggcgtggaagcatccactctctcctgaggcgagccaccttgggttgctggagctcaccagtcttgagggaggtgcaggggaaactgtgttttttatcttcatacatgacggtgggcagagaggcctgtcttaaagtttccatggaattgttttataaaatatcttaagagatgaataccttatcagctgttgcttgaaacctgttaaaaatgttcataacattggatagtctagtctctaaatgatgactaagtagtggggttggctttgaaaacaatgttttatgcaacaaggaacgaatggtagcagccagctttgcggggcgtatgtgtggccagctcttaaccattccagtctattacttgggtgagtccttgtggacaaccacacacacgtgcccacatggtactagctgccgttcgtttctcgttgcctaagatgttttggcaactctagagccacaggcctaagtcattaaaaaattctccctttgtaacctcagtgctggggactgaggcgagccccctcaggtcgctggagtgcaccagtcttggggaagaggtgcaggagaagctgtgttttttatctccacacgcagtatgaagataaaattacatagtattacctagacatagacagtattacctaggtagatgcactgctcacctgcgcccttcccagctctcatttttgttaggtgatttgggatagggatagtgttttggggtatggggggagtgtttctgacctgctttgcagacgtgcctccgcacctcagcagtttggggtgtggccccagggcggttcttggatgtaaaagatgtggccatctagcctcgtaacttcactgtcacctgtgtcccatagggtgccttctgaatactgttattagaataagtttgttgcagaacgtgaccctgcgtgcaaacatgtaccgtggcctggtatatgatagagattgatattaatgtaccatgtatgttaatgtgaatctgtgggcaggatacttttccatggcaggaaatatccaagctgttgaaactggctatgttttaatatgcctcattgtgcctttactgttgtgtggactgcgtgagggacaagaagttccatttgatgtcaataaagcaaagtacttgcctacttttttgaagctgaaaaaaaaaaaaaaaaaa

SEQ ID NO: 57449 - DNA, 1930 bp, Homo Sapiens
ttcaggctgagtcctaaacctgaagaaagtttagagcctggggctctaaactacctgagtctttccaaacgacaagccaagaagacctgttgaaagtttcctcttaagtttcgtggagagagactcaggtatagaaatatccttactgccacctgacctgaagcagaagaaatcacagacagcttccagaccaggcccaacatgtgtagcaccagtgggtgtgacctggaagaaatccccctagatgatgatgacctaaacaccatagaattcaaaatcctcgcctactacaccagacatcatgtcttcaagagcacccctgctctcttctcaccaaagctgctgagaacaagaagtttgtcccagaggggcctggggaattgttcagcaaatgagtcatggacagaggtgtcatggccttgcagaaattcccaatccagtgagaaggccataaaccttggcaagaaaaagtcttcttggaaagcattctttggagtagtggagaaggaagattcgcagagcacgcctgccaaggtctctgctcagggtcaaaggacgttggaataccaagattcgcacagccagcagtggtccaggtgtctttctaacgtggagcagtgcttggagcatgaagctgtggaccccaaagtcatttccattgccaaccgagtagctgaaattgtttactcctggccaccaccacaagcgacccaggcaggaggcttcaagtccaaagagatttttgtaactgagggtctctccttccagctccaaggccacgtgcctgtagcttcaagttctaagaaagatgaagaagaacaaatactagccaaaattgttgagctgctgaaatattcaggagatcagttggaaagaaagctgaagaaagataaggctttgatgggccacttccaggatgggctgtcctactctgttttcaagaccatcacagaccaggtcctaatgggtgtggaccccaggggagaatcagaggtcaaagctcagggctttaaggctgcccttgtaatagacgtcacggccaagctcacagctattgacaaccacccgatgaacagggtcctgggctttggcaccaagtacctgaaagagaacttctcgccatggatccagcagcacggtggatgggaaaaaatacttgggatatcacatgaagaagtagactgaaatatcagatttgtcatcaggaatactctttgtctactgtggtcctgtgcacgttggcctcagatggactacaggagattacaacgtacaaggcagatggagcattgacgttttcaaaaccattattcctgtgactggagaggcatcaggagaggtctcgttcgtctccagctcataaaatgtagcagcatcatccttgacagtgatgtttttcaggccctccattgagaacctgaggaaatctgtaaagataagtggtgatgttgtttcaaacgttcagaacagataccatcatcctgcctttgttagctgctgtagggaaagtgcgttacagatgtctgctgacctcacaagagtgaaaagataaactgtgcatgtgtttccacttccgtttctagtactatttatttttaaactacacttggggtggcctaatacctaggaagatgttgctattcacgttagtaaacagcctaaagaaactcttaggtttactgctacatccatttgtttggagaggtaactgttgtctgtgcctttttgaaaaacttccatttggtacaaaatttttactccaacaccccctcaacccttttctcagggaccacacctcttcttcccaaggtccctgggacttcctcattctttgtggtagtacaatgattggtagcaggtaaaataaatacatagaaagactactgtcaaaaaaaaaaaaaaaaaaaaaaaaaaaaaaaaaaaaaaaaaa

SEQ ID NO: 57450 - DNA, 2585 bp, Homo Sapiens
gcatgcgcaggctacccagccgcggggggtgcacggagaaaaggggcggggtggtccgggctgctgtgctggcagcagtaggcgagggcgcggctgcggggttcctggtgctgaggacggacgccattggagttcccgagaagcatggctgagggaagcttcagcgtgcaatcggaaagctacagtgttgaagacatggatgagggtagcgacgaagtcggggaggaagagatggttgaaggcaacgactatgaagaattcggtgcgtttggtggctatggcaccctcaccagctttgacatccatatcctcagagccttcggaagcttgggtccaggccttcgcatcttatcgaatgagccctgggaactggaaaaccctgtgctggcccagaccctggtggaggcattgcagctggatccggaaacacttgccaatgagacggccgcccgtgctgccaacgtagcccgcgccgccgcctccaaccgtgcggctcgggccgctgccgccgctgcccgtaccgccttcagtcaggtggtcgctagccaccgggtggccacgccgcaggtctcaggagaggatacccagcccacgacctacgccgccgaggctcaggggcccacccctgagccaccccttgcttctccgcagacctcccagatgttagtcaccagtaagatggctgcccccgaggctccggcaacctccgcacagtcccagacaggctccccggcccaggaggctgctactgagggccctagtagcgcctgtgctttctctcaggctccgtgtgccagggaggtggacgccaaccggcccagcacagccttcctgggccagaatgatgtcttcgatttcactcagccggcaggtgtcagtggcatggccttcccgcgccccaagagacctgccccagcccaagaggctgccacagagggccccagtgctgcctctggtgtgccccagacgggacctggcagggaggtggcagccacccggcccaagaccaccaagtcggggaaggcgctggccaagactcggtgggtggagcctcagaatgttgtggcagcagctgctgccaaggccaagatggccacgagcatccctgagccggagggtgcagctgctgccactgctcagcacagtgctgagccctgggccaggatgggaggcaagaggaccaagaagtccaagcacctggatgatgagtatgagagcagcgaggaggagagagagactcccgcggtcccacccacctggagagcatcacagccctcattgacggtgcgggctcagttggcccctcggcccccgatggccccgaggtcccagataccctcaaggcacgtactgtgcctgcccccccgcaacgtgacccttctgcaggagagggcaaataagttggtgaaatacctgatgattaaggactacaagaagatccccatcaagcgcgcagacatgctgaaggatgtcatcagagaatatgatgaacatttccctgagatcattgaacgagcaacgtacaccctggaaaagaagtttgggatccacctgaaggagatcgacaaggaagaacacctgtatattcttgtctgcacacgggactcctcagctcgcctccttggaaaaaccaaggacactcccaggctgagtctcctcttggtgattctgggcgtcatcttcatgaatggcaaccgtgccagcgaggctgtcctctgggaggcactacgcaagatgggactgcgccctggggtgaggcacccattcctcggcgatctgaggaagctcatcacagatgactttgtgaagcagaagtacctggaatacaagaagatccccaacagcaacccacctgagtatgaattcctctggggcctgcgagcccgccatgagaccagcaagatgagggtcctgagattcatcgcccagaatcagaaccgagacccccgggaatggaaggctcatttcttggaggctgtggatgatgctttcaagacaatggatgtggatatggccgaggaacatgccagggcccagatgagggcccagatgaatatcggggatgaagcgctgattggacggtggagctgggatgacatacaagtcgagctcctgacctgggatgaggacggagattttggcgatgcctgggccaggatcccctttgctttctgggccagataccatcagtacattctgaatagcaaccgtgccaacaggagggccacgtggagagctggcgtcagcagtggcaccaatggaggggccagcaccagcgtcctagatggccccagcaccagctccaccatccggaccagaaatgctgccagagctggcgccagcttcttctcctggatccagtaagagtttcggcaccgttgacgaactgcagcgatcttactggccaagccagagcgcctcctctcagattccttctcgacacagcaccctaggcggcttcttcctgtcagtcggaggtggcatgcaagatgaagctctctttgctcttcctgctttcattttgtgcttttccttgtgttttcatgttttgggtatcagtgttacattaaagttgcaaaattaaa

SEQ ID NO: 57451 - DNA, 4188 bp, Homo Sapiens; identical to SEQ ID NO: 23266

SEQ ID NO: 57452 - DNA, 2496 bp, Homo Sapiens
cagcagtggggcggggatggaggcggccgtggcgccggggagggatgcgccggcacccgcggcgagtcagcccagcggctgcgggaaacacaactcgccggagaggaaagtttatatggactataatgcaacgactcccctggagccagaagttatccaggccatgaccaaggccatgtgggaagcctggggaaatcccagcagcccgtattcagcaggaagaaaggccaaggatattataaatgcagctcgggaaagcctcgcgaagatgataggggggaaacctcaagatataatcttcacttccgggggcactgagtcaaataatttagtaatccattctgtggtgaaacatttccacgcaaaccagacctcaaagggacacacaggtgggcaccacagcccagtgaagggggccaagccccatttcattacttcctcggtggaacacgactccatccggctgcccctggagcacctggtggaagaacaagtggcagcggtcacctttgtcccggtgtccaaggtgagcgggcagacagaggtggacgacatcctcgcggcagtccgcccgaccacacgcctcgtgaccatcatgctggccaacaatgagactggcattgtcatgcctgtccctgaaatcagtcagcgcattaaagccctgaaccaggaacgggtggcagctgggctacctcccatcctcgtgcacacggatgctgcacaggccttggggaagcagcgcgtggatgtggaggacctgggcgtggacttccttacaatcgtggggcacaagttttatggtcccaggattggcgcactttatatacgaggacttggtgaatttacccctctctaccctatgctatttggaggtggacaagaacggaatttcaggccagggacagagaacaccccaatgattgctggccttgggaaggccgcggagctggtgacccagaactgcgaggcttatgaggcccacatgagggacgtccgcgactacctggaagagaggctggaagctgaattcggtcagaagagaatccatctgaatagccagtttccaggcacccagcggcttcccaatacctgtaacttttccatccggggaccccggcttcaaggccacgtggtgcttgcgcagtgccgagtgctgatggccagtgtgggggccgcgtgccactcggaccacggggaccagccgtccccagtgctgctgagctacggtgtccccttcgacgtggccaggaacgcgctccggctcagcgtgggccgcagcaccaccagggccgaggtggacctcgtcgtgcaggacctgaagcaggccgtggcgcagctggaggaccaggcctagcactggggccgccttccccaccccgcttctgggaagcccgtggcagggcacagggttgtccctccagttccctcctgagggctgtgccaggatgactgtctcatgccccctctgcattttgtcctggagtgccagcgagtgtgcacccccagtttccttccctggaaccctgcagagctcacagggcccaggacaccaacgccgcataggaccgcccacatgggaacgcccacatgggaccgcccacataggaccgcccacataggaccgcccacatgggaccgcccacatagaaccgcccacataggaccgcccacatgggaacgcccacatgggaccgcccacatgggaccgcccacatgggaccgcccacatagaaccgtcctccagtggtgaagcggaaacacttagctttatccaccctccccactgggaactgggcacgcctgttgtgagtgccctttcctggaaggtgtttttatctggaagatagaatccaagtatttataactcattgtcagccaaatgctatcatgaacgtaggaaacttgatttttttgttttgatcatggcctctacatgcacctttccagagtggtctcttctcgggccctttttagtccctttccaaagctgcccccaccaccctgctcctctggcctcagtgcacagtggcccccagcctcggccaggcctgctctgctcagcgcccaccgcccaccacccctcctgcttccccgagcctgaccctgttccgcccactggcaatcagggctgcgcacttccctgtccacggtccccaggccttcctgtcttgtcccttttgatcattaactcagggtttcagctccaacctcgctgagttggtgcagctccgggtcattcctggggtgggaatcggatcatccctgactcagcttataccttaattttatttgcagaggattcttttctcaaaatgctctggcatttggacacacatcacatgtcgatatttgcataggagtcattttcagtggaataacatttttaatgtgtggttttacggttcaaggaactacatgatgattttgaggaaacacttgccagaaactaaattaacgaataaaagatttcagtgcccgaaaaaaaaaaaaaaaaaa

SEQ ID NO: 57453 - DNA, 1968 bp, Homo Sapiens
atttcctcatcgtcaagctttgttcctcgtgggggctagaaatctctttccagttccagattgtgaagggttcctgagtaagcagcgtgtctccatccccctctctaggggctcttggatggaccttgcactctagaagggacaatggacttctggctttggccactttacttcctgccagtatcgggggccctgaggatcctcccagaagtaaaggtagagggggagctgggcggatcagttaccatcaagtgcccacttcctgaaatgcatgtgaggatatatctgtgccgggagatggctggatctggaacatgtggtaccgtggtatccaccaccaacttcatcaaggcagaatacaagggccgagttactctgaagcaatacccacgcaagaatctgttcctagtggaggtaacacagctgacagaaagtgacagcggagtctatgcctgcggagcgggcatgaacacagaccggggaaagacccagaaagtcaccctgaatgtccacagtgaatacgagccatcatgggaagagcagccaatgcctgagactccaaaatggtttcatctgccctatttgttccagatgcctgcatatgccagttcttccaaattcgtaaccagagttaccacaccagctcaaaggggcaaggtccctccagttcaccactcctcccccaccacccaaatcacccaccgccctcgagtgtccagagcatcttcagtagcaggtgacaagccccgaaccttcctgccatccactacagcctcaaaaatctcagctctggaggggctgctcaagccccagacgcccagctacaaccaccacaccaggctgcacaggcagagagcactggactatggctcacagtctgggagggaaggccaaggatttcacatcctgatcccgaccatcctgggccttttcctgctggcacttctggggctggtggtgaaaagggccgttgaaaggaggaaagccctctccaggcgggcccgccgactggccgtgaggatgcgcgccctggagagctcccagaggccccgcgggtcgccgcgaccgcgctcccaaaacaacatctacagcgcctgcccgcggcgcgctcgtggagcggacgctgcaggcacaggggaggcccccgttcccggccccggagcgccgttgccccccgccccgctgcaggtgtctgaatctccctggctccatgccccatctctgaagaccagctgtgaatacgtgagcctctaccaccagcctgccgccatgatggaggacagtgattcagatgactacatcaatgttcctgcctgacaactccccagctatcccccaaccccaggctcggactgtggtgccaaggagtctcatctatctgctgatgtccaatacctgcttcatgtgttctcagagccctcatcacttcccatgccccatctcgactcccatccccatctatctgtgccctgagcatggctctgcccccaggtcgtcttgcacaccttggcagccccctgtagttgacaggtaagctgtaggcatgtagagcaattgtcccaatgccacttgcttcctttccaagccgtcgaacagactgtgggatttgcagagtgtttcttccatgtctttgaccacagggttgttgctgcccaggctctagatcacatggcatcaggctggggcagaggcatagctattgtctcgggcatccttcccagggttgggtcttacacaaatagaaggctcttgctctgagttatgtgacatgcctcagccccatggactaagcaggggtctggtataaaaacactcctggaaacgcctttgccctgatccaaatgttagcacttgctagtgaacgtctacttatctcaagttctatgctaaaggcaatttatcttgatgtgatgataaaccaaacttattagcaagatatgcatatatatcaaaaaaaaaaaaaaaaaa

SEQ ID NO: 57454 - DNA, 4489 bp, Homo Sapiens
gcgccgtcccggccatgggcgcccgcggcggcctgcggagctggaggcgcggcgccggccgccaggcgcctttgtgagcggcgcggacgacaaaggcgcgggcccgggcagccgaggtgtgtagctgggacggtgctggtctgagctggaccttgtctgatggcttcctccaaccctcctccacagcctgccataggagatcagctggttccaggagtcccaggcccctcctctgaggcagaggacgacccaggagaggcgtttgagtttgatgacagtgatgatgaagaggacaccagcgcagccctgggcgtccccagccttgctcctgagagggacacagaccccccactgatccacttggactccatccctgtcactgacccagacccagcagctgctccacccggcacaggggtgccagcctgggtgagcaatggggatgcagcggacgcagccttctccggggcccggcactccagctggaagcggaagagttcccgtcgcattgaccggttcactttccccgccctggaagaggatgtgatttatgacgacgtcccctgcgagagcccagatgcgcatcagcccggggcagagaggaacctgctctacgaggatgcgcaccgggctggggcccctcggcaggcggaggacctaggctggagctccagtgagttcgagagctacagcgaggactcgggggaggaggccaagccggaggtcgaggtcgagcccgccaagcaccgagtgtccttccagcccaagctttctccagacctgactaggctaaaggagagatacgccaggactaagagagacatcttggctttgagagttggggggagagacatgcaggagctgaagcacaagtacgattgtaagatgacccagctcatgaaggccgccaagagcgggaccaaggatgggctggagaagacacggatggccgtgatgcgcaaagtctccttcctgcacaggaaggacgtcctcggtgactcggaggaggaggacatggggctcctggaggtcagcgtttcggacatcaagcccccagccccagagctgggccccatgccagagggcctgagccctcagcaggtggtccggaggcatatcctgggctccatcgtgcagagcgaaggcagctacgtggagtctctgaagcggatactccaggactaccgcaaccccctgatggagatggagcccaaggcgctgagcgcccgcaagtgccaggtggtgttcttccgcgtgaaggagatcctgcactgccactccatgttccagatcgccctgtcctcccgcgtggctgagtgggattccaccgagaagatcggggacctcttcgtggcctcgttttccaagtccatggtgctagatgtgtacagtgactacgtgaacaacttcaccagtgccatgtccatcatcaagaaggcctgcctcaccaagcctgccttcctcgagttcctcaagcgacggcaggtgtgcagcccagaccgtgtcaccctctacgggctgatggtcaagcccatccagaggttcccacagttcatactcctgcttcaggacatgctgaagaacacccccaggggccatccggacaggctgtcgctgcagctggccctcacagagctggagacgctggctgagaagctgaacgagcagaagcggctggctgaccaggtggctgagatccagcagctgaccaagagcgtcagtgaccgcagcagcctcaacaagctgttgacctcaggccagcggcagctgctcctgtgtgagacgttgacggagaccgtgtacggtgaccgcgggcagctaattaagtccaaggagcgtcgggtcttcctgctcaacgacatgcttgtctgtgccaacatcaacttcaagcctgccaaccacaggggccagctggagattagcagcctggtgcccctggggcccaagtatgtggtgaagtggaacacggcgctgccccaggtgcaggtggtggaggtgggccaggacggtggcacctatgacaaggacaatgtgctcatccagcactcaggcgccaagaaggcctctgcctcagggcaggctcagaataaggtgtacctcggccccccacgcctcttccaggagctgcaggacctgcagaaggacctggccgtggtggagcagatcacgcttctcatcagcacgctgcacggcacctaccagaacctgaacatgactgtggctcaagactggtgcctggccctgcagaggctgatgcgggtgaaggaggaagagatccactcggccaacaagtgccgtctcaggctcctgcttcctgggaaacccgacaagtccggccgccccattagcttcatggtggttttcatcacccccaaccccctgagcaagatttcctgggtcaacaggttacatttggccaaaatcggactccgggaggagaaccagccaggctggctatgcccggatgaggacaagaagagcaaagccccattctggtgcccgatcctggcctgctgcatccctgccttctcctcccgggcactcagcctgcagcttggggccctggtccacagtcctgtcaactgtcccctgctgggtttctcagcagtcagcacctcccttccacagggctacctctgggtcgggggcggacaggaaggcgcagggggccaggtggaaatcttttccttgaaccggccctcgccccgcaccgtcaagtccttcccactggcagcccctgtgctctgcatggagtatatcccggagctggaggaggaggcggagagcagagacgagagcccgacagttgctgacccctcggccacggtgcatccaaccatctgcctcgggctccaggatggcagcatcctcctctacagcagtgtggacactggcacccagtgcctggtgagctgcaggagcccaggtctgcagcctgtgctctgcctgcgacacagccccttccacctgctcgctggcctgcaggatgggacccttgctgcttaccctcggaccagcggaggtgtcctgtgggacctggagagccctcccgtgtgcctgactgtggggcccgggcctgtccgcaccctgttgagcctggaggatgccgtgtgggccagctgtgggccccgggtcactgtcctggaagccaccaccctgcagcctcagcaaagcttcgaggcgcaccaggacgaggcagtgagcgtgacacacatggtgaaggcgggcagcggcgtctggatggccttctcctccggcacctccatccgcctcttccacactgagaccctggagcatctgcaagagatcaacatcgccaccaggaccaccttcctcctgccaggccagaagcacttgtgtgtcaccagcctcctgatctgccagggtctgctctgggtgggcactgaccagggtgtcatcgtcctgctgcccgtgcctcggctggaaggcatccccaagatcacagggaaaggcatggtctcactcaatgggcactgtgggcctgtggccttcctggctgtggctaccagcatcctggcccctgacatcctgcggagtgaccaggaggaggctgaggggccccgggctgaggaggacaagccagacgggcaggcacacgagcccatgcccgacagccacgtgggccgagagctgacccgcaagaagggcatcctcttgcagtaccgcctgcgctccaccgcacacctcccgggcccgctgctctccatgcgggagccggcgcctgctgatggcgcagctttggagcacagcgaggaggacggctccatttacgagatggccgacgaccccgacgtctgggtgcgcagccggccctgcgcccgcgacgcccaccgcaaggagatttgctctgtggccatcatctccggcgggcagggctaccgcaactttggcagcgctctgggcagcagtgggaggcaggccccgtgtggggagacggacagcaccctcctcatctggcaggtgcccttgatgctatagcgcctcccctctcccctcagagggcacagctgcaggcctgaccaaggccacgcccggctctcgtgctctaggacctgcacgggacttgtggatgggcctggactctccagaaactacttgggccagagcaaaggaaaacctcttgttttaaaaaaatttttttcagagtgttttggggaggagttttagggcttggggagagggaggacacatctggaggaaatggccttctttttaaaagcaaaaaaacacaaaacctcacaactgcctggcaagcccagtatcacttgtttgggccctagcgggactccaaggcagccacacgcccctcctggaagggtgtgtgcgtgtgagtgtgtgcgagtgtgtgggctggtgtgtgaatatctataaataagtatatatggtgtatattatatgtgtataaataaagtctgtacatattggagctctgggagatgctggaataaaagacaagagttacatctgg

SEQ ID NO: 57455 - DNA, 13290 bp, Homo Sapiens; identical to SEQ ID NO: 29819

SEQ ID NO: 57456 - DNA, 3043 bp, Homo Sapiens
gctgtcagaacgccgcctcctccgcttgcggccggtctgcaccatgctgcgaacgtccgtcctccgcctgctaggacgcacgggggctagtaggctgtctctcctggaggacttcggcccacgctactacagttcgggctccctcagtgccggcgatgatgcttgtgatgtgcgcgcctacttcactacacccattttctacgtgaacgcggcgccgcacatcgggcacctgtactcggcactactggcggacgccctatgccgccaccgtcgcctccgaggtcccagcacggccgccacgcgattctccactggtaccgacgagcacgggctgaagattcagcaggcagcagctaccgcgggcctggccccgaccgagctgtgcgaccgagtctctgagcagttccagcagcttttccaggaggccggtatctcctgcacagatttcatccgcaccacggaggcccggcaccgggtggctgtgcagcacttctggggggtgcttaagtcccgcggtctgctctacaagggcgtctatgaaggttggtattgcgcttccgacgagtgcttcctgcctgaggccaaggtcacccagcagccgggcccatcgggggattcgtttcctgtatctctcgagagcgggcatccagtctcctggaccaaggaagaaaactacattttcaggctttcccagttccggaagccactccagcggtggctgcggggcaaccctcaggcgatcacccccgaaccatttcatcacgtagttcttcagtggctggacgaggagctgcccgacctgtccgtgtctcgcagaagtagccacttgcactggggcattccggtgcccggggatgattcgcagaccatctatgtatggctggatgccctggtcaactacctcactgtaattggctacccaaatgctgagttcaaatcttggtggccggccacctctcatatcataggtaaggacattctcaaattccatgccatctattggcctgccttcctgttaggggccggcatgagcccgccacagcgcatctgtgtccattcccactggacagtctgtggccaaaagatgtccaagagcttgggcaacgtggtggatcctaggacttgccttaaccgctataccgtggatggcttccgctactttctccttcggcagggcgtccccaactgggactgtgactactatgatgaaaaggtggttaagttgctgaactccgagctggcagatgccttgggaggtctcttgaaccgatgcactgccaaaagaataaatccttctgagacctacccagccttctgcactacctgcttccctagtgagccagggttggtggggccgtcagttcgtgctcaggcagaggattatgctctggtgagcgcagtggccactttgccaaagcaggtagcagaccactatgataactttcggatatataaggctctggaggccgtgtccagctgtgtccggcaaactaatggttttgtccaaaggcatgcaccatggaagctgaactgggagagcccagtggatgctccctggctgggtactgtgcttcatgtggccttggaatgtttgcgagtctttgggactttgctgcagcctgtcaccccaagcctagctgacaagctgctgtctaggctgggggtctctgcctcagagaggagtcttggagagctctatttcttgcctcgattctatggacatccatgcccttttgaagggaggaggctgggacctgaaactgggcttttgtttccaagactagaccagtccaggacttggctggtgaaagcccaccggacctagaaactcagttcttaccggcttgtggtaaaaaagcaaatgtgttatctttttattttttattttcaggaaagttatactagtattttcttaagtgtggaatcaaatgagcacataagctgtgtccctgtgaaaagaggtttgtagcctttcaggtgcctgctcctattcatttctctgtgaccattgatcactgtcctttgtgcattgtgtgtctaagatgtcttcaggggaaagatgggtaagagacagtgttgctaatgctgttccttctttgtgcctccttccaaaccacagttatttgcccaaactacctctcgtggctggtttttcattggcctggcctctgcttctcaggctaattagtgactcctttctttgagggtcagggttggaggccccttactggtggttttacagggggatcctactttgttacacatgttgggtttcctgataaaaagagagtattttattaaacccttgaaccagtgtcctagaccagatgatttttgcccatgtgtatccccatttaaattcctacaactaagtctccctgctttgttaatagtccaacagttgggttgtgtaacatcacacttcaaccggtagatggctctaatctcacacatttacttactaaagattgaggattcggaatatttagaataaattagttttctgctttctaattttgcagatctttacatttttattgcttttcttaaaataagggatagctttgcaaccactattgttttaatggaaagcaaaaaacccccccaaacttatcagaatcctcgttctttttcagactactgaaaaatgacatttactctgttaaatgtttaataagtgaataagtaaatgtatcaagttgtttatataataaattataaaactcttgaggcacttggtatgttaaaaattttaaactttagtaacattaggttacaggtatgatttaaaaatttgtaaatagttcaaaagggcaatgttttctttatatttcttatagtcttaattttgttatccatgtgcataatttacctcatgatttcttttggtcaatcaggatctttaatacaatatagaaattgtgtaatagttattataaatgttaatacacaactttcaggtaattttaactgattatttcttttgctcttttaacttaagttattaaagtttaaaagttcgtaagtaaaaaaaaaaaaaaaa

SEQ ID NO: 57457 - DNA, 6356 bp, Homo Sapiens
gacgcgaggaccatggctgcctccgagcgccgcgccttcgcgcacaagatcaacaggacggtggccgcagaggtgcggaagcaggtgtcccgggaacgcagtggctccccccactccagcaggcgctgcagcagctccctgggggtcccactgactgaagttgtcgagcccctggactttgaggatgtacttctgagccggccaccagatgctgagcccgggcccctcagggacctggtagaattcccagctgatgacttggagctgctgctgcagccccgggaatgccggaccacggagcccgggatccccaaggatgaaaaactggatgcccaggtgagggccgcggtggagatgtatattgaggactgggtcattgtccacagaaggtatcagtacctgagtgcagcatacagccccgtcaccacagacacacagcgggagcgacagaagggcctcccccgccaggtctttgagcaggatgcttctggagacgagaggtccggccctgaggactcgaatgactcccggcgtggctcgggctccccggaagacacccctcgaagcagtggtgcctctagcatcttcgacctgaggaacctggcagctgactcattgctgccctctctgctagagcgggcggccccagaagatgtggaccggcgcaatgaaacccttcgacggcagcaccggcccccggccctgctcaccctctacccggcacctgacgaggatgaagccgtggaacgctgtagccgcccagagccaccccgcgagcactttggacaaaggatcttggtcaagtgtctgtcgctcaagttcgagattgaaattgagcccatctttgggatcttggctctgtatgatgtgcgggagaaaaagaagatctcggagaacttctacttcgacctgaactcggactccatgaaggggctgcttcgggctcatggcacccaccctgccatctccaccctggcccgctctgccatcttctctgtgacctacccctcacctgacatcttcctggtcatcaagttggagaaggtgcttcagcaaggggacatcagtgagtgctgtgagccttacatggtgttgaaagaagtggacacagccaagaacaaagagaagctagagaagctgcgcctggcggccgagcagttctgcacccgcctgggccgctaccgcatgcccttcgcctggacggccgtgcacttggccaacatcgtgagcagcgctgggcagctggaccgggactctgactcggagggcgagcgccggccagcctggacagaccgccgccgtcgggggccccaggaccgggcgagtagtggggacgacgcctgcagcttctctggcttccgtccagccacgctaactgtcacaaacttctttaagcaggaggctgagcgactcagtgacgaggacctcttcaagttcctggctgacatgaggcgcccgtcgtccctgctgcggcgactacgtcctgtgactgcccagctcaagatcgacatttctccggctcctgaaaatccccacttctgcctctcccctgagctgcttcatatcaagccctacccggaccccaggggccggcccaccaaggagattctggagttccccgcccgcgaagtctatgccccccataccagctacaggaacctgctgtacgtgtacccgcacagcctcaacttcagcagccgccagggctccgtgcgcaaccttgctgtgcgagtgcagtacatgacaggcgaggaccccagccaggctctgccggtcatctttggcaagtccagctgcagtgaatttacccgcgaggccttcacaccggtggtctaccataacaagtcccccgagttctacgaggagttcaagctgcatcttccagcctgcgtgacagagaaccatcacctgctgttcaccttctaccatgtcagctgccagccccggccgggcactgccctggagacacccgtgggctttacttggatcccactgctgcagcacaggcgcctgaggaccggccccttctgtctcccagtgtctgtggaccagccgccgcccagctattccgtgctcacacccgatgtggcgcttccgggcatgcgctgggtggacggtcacaagggcgtgttcagtgtggagctcacggccgtgtcctctgtgcacccccaggacccctacctggacaaattcttcaccctggtgcacgtcctggaggagggagccttcccattccggctcaaggacactgtgctgagcgagggcaacgtggagcaggagctgcgggccagtcttgcagcactgcgcctggccagccccgaaccccttgtggccttctcccaccacgtgctggacaagctcgtgcgtctggtcatcaggcccccgatcatcagtggccagattgtgaacctgggccgtggagcctttgaagcaatggcccatgtagtcagccttgttcaccggagcctggaggcagcccaggatgcccgcggtcactgcccacagctggctgcctacgtccactacgcctttcgccttcctggcactgagcccagcctcccggatggggcccctccagtgacagtgcaggctgccacactggcccgtggctctggtcgccccgcaagcctctacctggcgcgttccaagagcatcagcagcagcaaccctgacctcgccgtggcccctggctctgtggatgacgaggtttcccgcatcctggccagcaagctgcttcacgaggagctggctctgcagtgggtggtcagcagcagtgccgtacgcgaggccatcctccagcacgcctggttcttcttccagctcatggtgaagagtatggcgctgcacctgctgcttggccagcgactagacacaccccgcaagctgcgcttccccggacgcttcctggacgacatcactgccttggtgggctctgtgggcctggaggtcatcacccgtgtccacaaggatgtggagctggccgagcacctcaacgccagcctggctttcttcctcagtgaccttctgtccctggtggaccggggctttgtcttcagcctggtccgggcccactacaagcaggtggccacgcggctccagtcgtcccctaatccagcagccctgctgaccctgcgcatggaattcacccgcatcctgtgcagccacgagcactacgtgaccctcaacctcccctgctgccccctgtcacctccagcctcgccctccccctctgtgtcctccaccacctcccagagctccaccttctccagccaagccccggaccccaaggtgaccagcatgttcgaactgagtggaccattccggcagcagcacttcctagctgggctcctgctgacggagctggcactggccctcgaacctgaggctgaaggggcattcctgttgcacaagaaggccatcagtgctgtgcacagcctgctatgtggccatgacactgacccccgctacgccgaggccactgtgaaggctcgtgtggccgagctgtacctgccactgctttcgattgcacgggataccttgccacggctgcatgactttgctgagggcccaggtcagcggtcaagactggcctcaatgcttgactcagacacagaaggcgaaggggacattgcgggtaccatcaacccctctgtggccatggccattgctggtggccccctagcccctggctcccgggccagcatctcccaggggccaccaacggcttctcgcgcaggctgtgccctctctgctgagtcaagccggaccttgctggcgtgtgtgctgtgggtgctgaaaaacaccgagccggcgctcctgcagcgctgggccactgacctgacactcccccagctgggacgtctgttggacttgctgtacctttgcctggctgcctttgagtacaaggggaaaaaggcctttgaacgcatcaacagcctcacattcaaaaaatctctggatatgaaggcgcggctagaggaagccattctgggtaccatcggagctcgacaagaaatggttcggcgaagtcgtgagaggagcccgtttgggaatccagagaacgtgcgctggcggaagagcgtcacacactggaagcaaacctcagaccgcgtggacaagaccaaggatgaaatggaacacgaggccttggtggaagggaacctggcaaccgaggcaagcctagtggttctggacacactggagatcatcgtgcagacggtgatgctttcagaagcccgggagagcgtcttgggggcagtgctgaaggttgtgctgtacagcctgggcagtgcccagagtgccctcttcttgcagcatggcctggccacccagagggcccttgtgtccaagttcccggagctgctgttcgaggaggacacggagctgtgtgccgacctgtgcctgaggctcctacgacactgtggcagccgcatcagcaccatccgcacgcacgccagcgcctcgctgtacctgctcatgcgacagaacttcgagatcggccacaactttgcccgtgtgaagatgcaggtcaccatgtctctctcgtccctggtggggacgacgcagaacttcagtgaagagcacctgcgacgttcactcaaaaccatcctcacctatgctgaggaggacatggggctgcgggacagcaccttcgcagagcaggtccaggacctgatgttcaacctgcacatgatcctgacggacacggtgaagatgaaggaacaccaggaggaccctgagatgctcatcgacctcatgtacagaattgcccggggctaccagggctcaccggaccttcggctgacctggttgcagaacatggccgggaagcacgcggagctgggcaaccacgccgaggccgcccagtgcatggtgcacgcggccgccctcgtggctgagtacctcgccctgctcgaggaccaccgccacctgcccgtgggctgcgtttccttccagaacatctcatccaacgtgctagaggagtccgccatctccgacgacatcctgtcgcccgacgaggagggcttctgctccgggaagcacttcactgagctggggctggtagggttgctggaacaggcagccggctacttcaccatgggcgggctctacgaggcggtgaatgaggtctacaagaacctcatccccatcctggaagcccaccgtgactacaagaagctggccgcggtgcacggcaaactgcaggaggccttcaccaagatcatgcaccagagttccggctgggagcgcgtgttcgggacgtatttccgcgtgggcttctacggcgcccacttcggtgacctggatgagcaggagtttgtgtacaaggagccatcgatcacgaagctggcagagatctcacaccggctggaggagttctacacggagagatttggcgacgacgtcgttgagattatcaaagactctaaccctgtggacaagtccaagcttgactcacaaaaggcctacatccagatcacgtatgtggaaccgtactttgatacctacgagctcaaggaccgggtgacctactttgaccgcaactatgggcttcgcacattcctgttctgcacgccgttcacgccggatgggcgcgcacacggggagctgcccgagcaacacaagcgtaagacgctgctcagcaccgaccacgccttcccctacatcaagactcgcatccgtgtgtgccaccgggaggagacggtgctgacgccagtggaggtggccatcgaggacatgcagaagaagacacgggagctggcctttgccaccgagcaggacccaccagatgctaagatgctacagatggtgcttcagggctctgtagggcccaccgtgaaccagggtcccctggaggtggcccaggtgtttttagcagagatcccggaagaccccaagctcttccggcatcacaacaaattgcggctctgcttcaaggacttctgcaagaaatgtgaggatgcgctgcggaaaaataaggccctgattgggccggaccagaaggagtaccaccgtgagctggagcgcaactactgccgcctgcgggaggctctgcagcccctgcttacccagcgcctgccccagctgatggcacccaccccacccggcctcaggaactccttgaacagagcaagtttccgaaaggcagacctctgagcccacaaggaccaaagctgtacctagaggaaccagcacccgggcctcagctgtctgtgctgcgaggggagtctgccctggtgcccactgggctgtggggtgaccacactgtacttggggctgggccctctgcccctgtgtccccatctgtgtgcactgatgcttcctcccttttttaatttaaaatggtttttataagc

SEQ ID NO: 57458 - DNA, 1934 bp, Homo Sapiens
actggagcatgggacggcgcgcctgaaggagcaggaaggggaaggaggcctgggaccccgaaaagagaaggggagagcgaggggacgagagcggaggaggaagatgcaactgactcgctgctgcttcgtgttcctggtgcagggtagcctctatctggtcatctgtggccaggatgatggtcctcccggctcagaggaccctgagcgtgatgaccacgagggccagccccggccccgggtgcctcggaagcggggccacatctcacctaagtcacgccccatggccaattccactctcctagggctgctggccccgcctggggaggcttggggcattcttgggcagccccccaaccgcccgaaccacagccccccaccctcagccaaggtgaagaaaatctttggctggggcgacttctactccaacatcaagacggtggccctgaacctgctcgtcacagggaagattgtggaccatggcaatgggaccttcagcgtccacttccaacacaatgccacaggccagggaaacatctccatcagcctcgtgccccccagtaaagctgtagagttccaccaggaacagcagatcttcatcgaagccaaggcctccaaaatcttcaactgccggatggggtgggagaaggtagaacggggccgccggacctcgctttgcacccacgacccagccaagatctgctcccgagaccacgctcagagctcagccacctggagctgctcccagcccttcaaagtcgtctgtgtctacatcgccttctacagcacggactatcggctggtccagaaggtgtgcccagattacaactaccatagtgataccccctactacccatctgggtgacccggggcaggccacagaggccaggccagggctggaaggacaggcctgcccatgcaggagaccatctggacaccgggcagggaaggggttgggcctcaggcagggaggggggtggggacgaggagatgccaagtggggccagggccaagtctcaagtggcagagaaagggtcccaagtgctggtcccaacctgaagctgtggagtgactagatcacaggagcactggaggaggagtgggctctctgtgcagcctcacagggctttgccacggagccacagagagatgctgggtccccgaggcctgtgggcaggccgatcagtgtggccccagatcaagtcatgggaggaagctaagcccttggttcttgccatcctgaggaaagatagcaacagggagggggagatttcatcagtgtggacagcctgtcaacttaggatggatggctgagagggcttcctaggagccagtcagcagggtggggtggggccagaggagctctccagccctgcctagtgggcgccctgagccccttgtcgtgtgctgagcatggcatgaggctgaagtggcaaccctggggtctttgatgtcttgacagattgaccatctgtctccagccaggccacccctttccaaaattccctcttctgccagtactccccctgtaccacccattgctgatggcacacccatccttaagctaagacaggacgattgtggtcctcccacactaaggccacagcccatccgcgtgctgtgtgtccctcttccaccccaacccctgctggctcctctgggagcatccatgtcccggagaggggtccctcaacagtcagcctcacctgtcagaccggggttctcccggatctggatggcgccgccctctcagcagcgggcacgggtggggcggggccgggccgcagagcatgtgctggatctgttctgtgtgtctgtctgtgggtggggggaggggagggaagtcttgtgaaaccgctgattgctgacttttgtgtgaagaatcgtgttcttggagcaggaaataaagcttgccccggggaaaaaaaaaaaaaaaa

SEQ ID NO: 57459 - DNA, 3179 bp, Homo Sapiens
cagagagagagagaaaaactgctgaccctgtaagagagaactggccatcttgcagacagacagagccccgagtgttctttcaactacctgccacccatccaacaactcccctcggacctcagtatgggctggaacctgacacttggcatgacagtgaccccaggcatccaaaccatgacagttccatcagctctccaaatgagagacagagtctcactatgtcgcccaggcttgtcttgaactcctggactcaagagatcctcccatctcggcctctcaaagtgttgggattacaggcgtgagctattacacctgacttaagtctccattttcatatctatactttgggattccagaagacagaggtttgagtgtaaaacacaaaataacaaaaccacaacaaaaacaactctgtattctcgtccccaccattaccatctctcctttgtgatgtcaaagagaccagaggaagtggacagactcggggaagaatagccagagtaagccttccaaattaaccccaggaatggcttcaacagaggaacagtacgatcttaagattgtgaaagtggaggaagaccctatctgggaccaagaaacccaccttcgagggaacaacttttctggccaagaagcctcccgacaactttttaggcagttttgttaccaagagactcctggtccccgagaagctctgagccggctccgagaactctgtcatcagtggctaaggccagaaatccacaccaaagagcaaatcttggagctgctggtgctggagcaattcctgactatcctgcctgaggagctccaggcctgggtgcgggagcaccatccggagagtggggaggaggctgtggctgtagttgaagatctggaacaagagcttagtgagccagggaaccaggctccagaccatgaacatggacattctgaagtgctcttggaggatgtggaacatctgaaggtcaagcaggaaccaacagacatacagcttcagcctatggtgacacagctcagatatgaatctttttgcctccaccaatttcaagaacaagatggtgaaagtatacctgagaaccaggagttggcatcaaagcaagaaatcttaaaagaaatggaacatttgggggatagcaaactccaaagagatgtatctttggattctaagtacagagaaacttgtaaacgagacagcaaggcagaaaagcagcaggcacattccactggagagagacgccacaggtgcaatgaatgtgggaaaagcttcactaagagttcagtactcattgagcaccagagaatccacactggggagaagccatatgaatgtgaagaatgtgggaaggccttcagccggaggtcaagcctgaatgaacatcggcggagccacactggagagaaaccctatcaatgtaaggagtgtgggaaagccttcagtgccagcaatggcctcactcgacacagaagaatccacacaggggaaaaaccatatgaatgcaaagtgtgtgggaaggctttcctcctcagctcatgccttgttcagcatcagaggatacacactggagagaagcgctatcagtgtcgtgagtgtggcaaagccttcattcagaatgcagggcttttccagcatctccgagtccacactggtgagaaaccctatcagtgcagtcagtgcagtaaactctttagtaagcggacacttcttaagaaacatcagaaaatccacactggagagagaccataagggtgatgagtttgggaaagccttcagtcatcattgcaaccttattaggcattttagaatccatactgttccagcagaactggactaattctgtggaccctcagacccctaaatggggccgtcttggaaagtaagattttcaagtggcttattctgttcttataaaatttattttgtattgcattgaaccacttgtctacaaaccaggtgttggtgtctcctgtgtggatgactgtgattgtagggggttgctgggtggccttcttattccctagcctttggtccatttcttatgatttcctttaaaggcaccaaatcttatctggaaataaattgttatggaggggctgtttttgagcaatactgcatattgaacaattctaaaagaccagtatctatgtatacttttaaaaaaaagatttgctaagatcaaaggatattcagaggtgcatctttttctgtaagagtgacattttaaacaaatgtaaggttttggggaataagaatcgtccacattcccacaggaaatcattgctatggtctcccctaggaatgtgatagatagcttctataattatgcagcattatccatagtatgaaacctgtagttttaatggtttagaaatctatgtctcatttcatatctaactcatgtttttgatacgaatcaatatatatgttgatatcatgagttaatatgagtttgacatgaatcatcaacatagtatatacatatcaacataactatgttgatgattcatatcaaattctcaatgcaggtcattactgtaagttttccatttttgttacaaataataagtaagatgatactttaaaatctctgttcttcacaaggtacctctttaattcatagccttttatgtcagcattattcttcttttgggggttggtcagcaactttgagtgccattgcaagcagcatcatttaagtagttttataaagaaaagaagtctgatatcttgggcagcttgctgcttactggggagaccagcatgcttagacacttattgccagggttaaacatatgctctggcaccaagttcaaatctttcctccccatttgtgagctgtgggactttaggcaagttatctaaatgctgctatgctatagtctccccacctgtaaaacagaggatgataccaataccttcctcatagggtacataagattaaataaatacaaacttgtacttaaaatgtagctctcaataaatatgcattatgatttacatacgaaataatagcatttaacaaatgtaggtagaattttaagtatcatgttaaaattaggatacgaaatgcctctgctgacattcttgttactcttttctccacagtcaaaacctgaatcagaatatttcaaaagagaggaaataaaagttcagcttaaaactgttctgccctaaaaaa

SEQ ID NO: 57460 - DNA, 4113 bp, Homo Sapiens; identical to SEQ ID NO: 28628

SEQ ID NO: 57461 - DNA, 5840 bp, Homo Sapiens; identical to SEQ ID NO: 30057

SEQ ID NO: 57462 - DNA, 1783 bp, Homo Sapiens
aaggaataaagttgctgattcattcctttacactgaaaccctttgttgtgccctcctcttccttcctctttatagggagacactctgagaaagagcacattgtgggggcccactccatgtgatgtttgcttggttgcctgttcccttttctacctgcagagcacggttcccataagggcggcgagatcagcctcctgtctcatctggaagaccaccactctggggtctcagaggaatgatggaagccttggggtttctaaaattggaagtgaatggccccatggtgacggtggccctgtcagtggctctcttggccctcctgaaatggtactccacatcagcattctcaagactggagaagttaggcctcagacatcccaagccttctcctttcattggaaacttgacatttttccgccagggtttttgggaaagccaaatggagctcagaaagctgtatggacctctgtgtgggtactatcttggtcgtcggatgtttattgttatttctgagccagacatgatcaagcaggtgttggttgagaacttcagtaactttaccaacagaatggcgtcgggtttggagttcaagtcggtagccgacagcgttctgtttttacgtgacaaaagatgggaagaggtcagaggtgccctgatgtctgctttcagtcctgaaaagctgaacgagatggttcccctcatcagccaagcctgcgaccttctcctggctcatttaaaacgctatgcggaatctggggacgcatttgacatccagaggtgctactgcaattacaccacagatgtggttgccagcgtcccgtttggcaccccggtggactcctggcaggcccctgaggatccctttgtgaaacactgcaagcgtttcttcgaattctgcatccccagacctatcctggttttactcttatcatttccatccataatggtcccactggcccggattttgcccaataagaaccgagacgaactgaatggcttttttaacaaactcattaggaatgtgattgccttgcgggaccagcaagctgccgaagagaggcggagagacttcctccaaatggtcctggatgcccgacattctgcaagtcccatgggcgtgcaagactttgacatcgtcagagacgttttctcctctactgggtgcaagccgaacccttcccggcaacaccagcccagccctatggccaggcctttgactgtggatgagattgtgggccaggccttcatcttcctcatcgctggctatgaaatcatcaccaacacactttcttttgccacctacctactggccaccaaccctgactgccaagagaagcttctgagagaggtagacgtttttaaggagaaacacatggcccctgagttctgcagcctcgaggaaggcctgccctatctggacatggtgattgcagagacgctgaggatgtacccgccagctttcagattcacacgggaggcagctcaggactgcgaggtgctggggcagcgcatccccgcaggcgctgtgctagagatggccgtgggtgccctgcaccatgaccctgagcactggccaagcccggagaccttcaaccctgaaaggtaccgctgcagctagaatccaaatctgccctaggtccaaaaaatggtgtctatatcaagatcgtatcccgctgacacagaaggctgccgggtggggggagggcacccccaaattcaaagaaaaccctaagtgtggatgttcagaattttggaaaaatgtcactgaagtgattgaaagccg

SEQ ID NO: 57463 - DNA, 4236 bp, Homo Sapiens; identical to SEQ ID NO: 29843

SEQ ID NO: 57464 - DNA, 2180 bp, Homo Sapiens; identical to SEQ ID NO: 29587

SEQ ID NO: 57465 - DNA, 3535 bp, Homo Sapiens; identical to SEQ ID NO: 29218

SEQ ID NO: 57466 - DNA, 7434 bp, Homo Sapiens; identical to SEQ ID NO: 29888

SEQ ID NO: 57467 - DNA, 15563 bp, Homo Sapiens
cgcacgccgagcggctgccgggggaagcagaggcgccggaggctggggcaccgccgacgcctcgggagccatggccgaagggggagaaggaggcgaggacgagatccagtttctgaggactgaggatgaagtggtactccagtgcatcgccaccattcataaggagcagaggaagttctgcctggcagccgagggacttgggaatcgcctgtgcttcttggaacccacttcagaagccaagtacattcctccagatctctgcgtctgcaattttgtgctggaacagtccctatctgtcagagccctgcaggaaatgcttgccaacacaggtgaaaatggcggcgaaggggcagcacaaggaggtggccacaggaccctgttatacggccatgcagttctcctgaggcactctttcagcggaatgtatctaacatgcttgactacatcaagatcccagacagacaaacttgcctttgatgtaggtctacgggaacatgccacaggagaagcctgttggtggactatacatcctgcttccaaacagaggtccgaaggagagaaagttcgaattggcgatgacctcatcctcgtcagcgtgtcctctgaaagataccttcatctctcagtatcaaatggtaacatacaagtggatgcctcctttatgcaaacactctggaatgtacatcctacgtgctcaggaagtagcatcgaagaaggatacctacttggtgggcatgtagtacgtcttttccatggtcatgatgaatgtttgacgataccatctacagaccagaatgattcccagcacaggaggatattctacgaagctgggggagctgggactcgagccaggtctctttggagagtggaaccccttcggataagctggagtggcagtaacatcagatggggccaggctttccgactccggcatctcaccacaggccactacctggccttgacagaagaccaaggccttatactgcaagaccgggcaaagtcagacaccaagtccacagctttctctttccgggcatcaaaggaactcaaggagaaattagactccagtcacaagcgagacatagaaggcatgggagttccagaaatcaagtatggagattctgtctgctttgtgcagcatatagccagtggtctgtgggtgacctacaaagcacaagacgccaaaacttcccgcctgggacctctaaaaagaaaggtcatactccatcaggaaggccacatggatgatggattaacactgcagagatgccagcgtgaggagtcccaggctgctcggatcatccggaacactacagccttattcagccagtttgtcagtggaaacaatcgcacagctgcccccatcaccctgcctatagaagaagtcctgcagaccctacaggacttgatcgcctacttccagcccccagaggaggagatgcgacatgaagacaagcagaacaagctccgctcactcaaaaacagacaaaatcttttcaaggaagagggaatgttggcccttgtcttaaattgcattgaccgcttaaatgtctacaatagcgtagcacactttgcagggattgcaagggaagagagtggcatggcctggaaagaaattctgaacctcctctacaaattgctggctgctctcattcgcggaaacagaaacaattgcgctcaattctccaataaccttgattggctcatcagtaaattggacagactagaatcttcctcaggtatcttggaagttttgcactgcatcttaactgaaagcccagaagccttaaatctgatagcggagggccacatcaagtcgatcatctccctgttggataagcacgggcggaatcacaaggttctggatatcctgtgctccctctgtctctgcaatggggttgcagtgagagccaaccagaatctgatctgtgacaacttgctgccccggagaaacctactcctgcagacacgactgattaacgatgtaaccagtatccggccaaacatcttcctgggagtcgcggagggctcagcccagtacaagaagtggtacttcgagctgattatcgaccaggtggaccccttcctaacagcagagcccacacatctgcgggtgggctgggcctcttcttcaggctatgccccatacccaggaggtggagaaggatggggaggcaatggtgttggtgacgacctgtactcctatggctttgatggacttcacctttggtcaggccggatacccagagctgtggcttccatcaaccagcacctcctgagatcggatgacgtggtaagctgctgcctggacctcggggtgcccagcatctcattccgcatcaatgggcagcccgtgcaggggatgtttgagaacttcaacacagacgggctcttcttccctgtgatgagcttttcagcaggtgtcaaagtacgtttcctgatgggtggacgtcatggagagtttaagttcctgcctccctctggctatgccccttgctatgaagccttacttccaaaagagaagatgagattggagcctgtcaaagaatataaacgtgatgctgatggcattagagatctcttgggtaccacccagttcctctcccaagcctctttcatcccatgccccgtagacaccagtcaggttattttgccacctcacctagaaaagatccgagacagactagctgaaaacatccatgagctttggggaatgaataaaatagaacttggctggactttcggcaagatacgagatgacaataaaagacaacacccttgccttgtggagttttcaaagctcccagaaactgagaagaactataacctgcaaatgtcaactgaaaccttaaaaaccctcttggccctggggtgccacattgctcatgttaacccagctgctgaggaggatctcaagaaggtcaaactgcccaaaaactatatgatgtccaacggctataagccagcccctttggatttgtctgatgtgaagctgttacctcctcaagaaattttagtggataagcttgcagaaaatgcacacaatgtttgggcaaaagacagaataaaacaaggatggacctatggcatccaacaggatttgaagaacaaaagaaatccccgtctggtgccatatgcattactggatgagcgtaccaagaagtcaaacagggacagcctgcgggaagctgtgcgcacttttgttggttacgggtataacattgagccatcagaccaagaactagctgactcggctgtggagaaggtcagcatagacaagatccgatttttccgggtagagcgatcttatgcagtgagatctggaaagtggtattttgagtttgaagtggtgactggaggagacatgcgagtcggctgggcgaggccaggctgtcgacctgatgtcgagctgggggccgatgaccaagcctttgtgtttgaaggcaacaggggccagcgttggcatcaaggaagtgggtattttgggcgtacctggcagccaggggatgtggtcggatgtatgattaacctggatgatgcttcaatgatcttcacactgaatggggagctgctgatcaccaacaaaggctctgaacttgccttcgctgactacgagattgagaatggcttcgtgcccatctgctgtctgggtctatctcagatcggccgcatgaatctcgggacagatgccagtaccttcaagttttataccatgtgcggtctccaagagggctttgagccttttgctgtcaacatgaacagagatgttgctatgtggttcagcaagcgcctcccgacgtttgtcaacgtgccaaaggatcatccacacatagaggtcatgaggattgatggcaccatggacagccctccgtgtctcaaggtgacgcataagacatttggcacacagaatagcaatgccgacatgatctattgccgcttgagcatgcctgtcgagtgccactcctccttcagccacagcccctgtctggacagtgaagctttccagaaaaggaaacagatgcaagaaatactctctcatacaacaacacagtgctactacgccatccgcatctttgctggacaggatccatcctgtgtctgggtcggatgggtgactccagactatcacttgtacagtgaaaagtttgacctgaataaaaactgcacagtgactgtcaccctaggggatgaaagaggccgggtccatgaaagtgtgaaacgcagcaactgctacatggtctggggtggagacattgtagccagttcccagagatcaaatcggagcaacgtggacctggagatcggctgtctcgtggatctggccatgggcatgttgtccttctcagccaatggaaaggaactgggcacctgctaccaggtggagcctaataccaaagtgtttccagcagtcttcctgcagcctacaagtacttctttgtttcagtttgaacttggaaagctgaagaacgcaatgcccctgtcagcggccatattcaggagtgaagagaagaacccagtcccacagtgtccacctcggctggacgtccaaaccatccagcccgtgctctggagccgcatgcccaacagcttcctgaaggtggagaccgagcgtgtgagcgagcgccacggctgggtggtgcagtgcctggagcccctgcagatgatggcgctccacatccccgaggagaacaggtgtgtggatatcctggagctctgtgagcaggaggacctgatgcggttccattaccacacgctgaggctctacagcgcggtgtgcgccctgggaaacagccgcgtggcctacgccctgtgcagccacgtggacctctcccagctcttctatgccattgacaacaagtacctccccggcctccttcgatctggtttctatgacctgctcatcagcatccacctggccagcgccaaggagaggaagctgatgatgaagaacgagtacatcatccccattaccagcaccaccaggaatatctgcctcttcccggacgagtccaagaggcatggactgcctggggtgggcctgagaacatgtctcaagcccgggttcaggttctccaccccttgctttgttgtgactggtgaggatcaccaaaagcagagccccgagattcccttggagagtctcaggacgaaggctctgagtatgctgacagaggcagtgcagtgcagcggggcccacatccgagaccctgtaggggggtctgtggagttccagtttgtgcctgtgctgaaactcattggaaccctgctggtcatgggcgtgtttgatgatgatgatgttcggcagatcctcctcctgattgatccctctgtgtttggggagcatagtgcggggacagaggagggagcagaaaaggaggaagtgacccaggtggaggagaaggctgtggaggctggggagaaggccggcaaggaggctcctgtcaaaggcttgttgcagactcgattacccgaatccgtcaagctgcagatgtgtgagctcctcagctatctctgcgactgtgagctgcagcaccgagtggaggccattgtggcatttggtgacatttatgtctccaagctgcaggcaaatcagaagttccgctacaatgagctcatgcaggccctgaacatgtctgcggccctgactgcccggaagaccaaggagttccgctcacccccacaggagcagatcaacatgctgcttaactttcaactgggagagaactgcccctgcccagaggagattcgggaggagctgtatgatttccatgaggaccttctccttcactgtggggttcctttggaagaagaggaagaggaggaggaggacacctcctggacaggaaaactctgtgccttggtttacaaaatcaaaggcccacccaagccagagaaggagcagccgacggaggaggaggagagatgccccacaacattgaaggaactcatctcacagacgatgatctgctgggcccaggaggaccagatccaggattcagagctggtccgaatgatgttcaacctcctccggaggcagtatgacagcattggggagctgctgcaggcgctgcggaagacctacaccatcagccacacctctgtaagcgacaccatcaacctgctggctgccctgggccaaatccgctccctcctcagtgtcaggatgggcaaggaagaggagttgctcatgatcaatgggctgggagacataatgaacaacaaggtgttttaccagcatcccaacctcatgagagtcctgggcatgcacgagacggtgatggaggtgatggtgaacgtgttgggtacagagaaatctcagattgcatttccaaagatggttgctagctgctgccgtttcctttgctatttctgtcgaattagccggcaaaatcagaaggccatgtttgagcatctgagttatcttctggagaatagcagtgttggcctagcctccccgtcgatgaggggatccaccccgctggatgtggcagcttcctctgtgatggacaacaatgagttagcgctgagcttagaggaaccagacctcgagaaggtggtgacctacttggcaggctgtggcctacagagctgccccatgcttctggccaaaggataccctgatgtcggctggaaccccattgaaggggaacgctacctgtccttcctgaggtttgctgtcttcgtgaacagtgagagtgtggaagaaaacgccagcgttgtggtcaagctgctcatcagacgcccagagtgcttcggcccggccctgcggggtgaggggggaaacgggctcttggcagccatgcagggtgccattaagatctctgagaacccagcgctcgacctcccctctcaaggatacaaaagagaagtcagcacggaggacgatgaagaggaagaagaaatcgtgcatatgggcaatgcaattatgtcattttattcggcccttatagatctactgggccgctgtgctcctgaaatgcacctcatccagacaggaaagggggaagccatccgcatcaggtccatcctgcgctccctggtccccacagaagacctggttgggatcatcagcatccccttgaaactgccctccctcaacaaagatgggtcggtcagtgagccagatatggcggccaatttctgccctgaccacaaggcacctatggtgctgttcttggaccgcgtttatggcattaaggatcaaacttttctgctccacttgctggaggttggatttttacctgacctaagagcttctgcctctctagatacagtttccctaagcaccacagaggctgcgcttgcactaaataggtatatatgttctgctgtgctcccgctcctcacaagatgtgcccctctctttgccggaacagaacactgcacctctctgattgattccacactgcagacaatatacaggctatccaagggacgttccctcaccaaagcacaaagggacactatagaagaatgtttgcttgccatttgcaatcacttgaggccttccatgttacagcaactcctgcgacgcctcgtttttgatgtgccgcaactcaatgaatactgcaaaatgcctctcaagcttctgacgaatcactatgaacagtgttggaagtattactgcctgccttcaggatgggggagctacgggctagctgtggaagaagagctgcacctaacggagaagcttttctgggggatttttgactcgctctcccataagaaatatgacccagatcttttccgaatggccctgccttgtctcagtgctatagctggggccttgccaccagattatttagataccagaatcacagccacgttggagaaacagatctcagtggatgcggatggcaactttgacccaaaacctattaacaccatgaatttttccttgcctgaaaaattggaatacatcgtcaccaagtatgctgagcattcacatgataaatgggcctgtgacaagagtcagagtggatggaaatatgggatttccctggatgaaaatgtgaagacccacccactgataaggcctttcaagacattaacggagaaggagaaggaaatttatcgctggcctgcgcgagagtccctgaaaaccatgctggctgtgggctggactgtggagaggaccaaagagggagaagctttggttcaacagcgggaaaatgagaagcttcgaagtgtgtcccaggccaaccagggcaacagctacagtcctgctcccctcgacctctcaaacgttgtgctctccagagagctccagggaatggtggaggtcgtggctgagaactatcacaatatctgggccaagaagaagaagctggagctggagagcaaaggtggtggcagccaccctcttctggtaccatatgacaccttgactgccaaggaaaagttcaaggaccgggagaaggcacaggacctgtttaagttcctccaagtgaatggcatcatagtttccaggggtatgaaggatatggagctggatgcctcctccatggagaagaggtttgcctataagttcttgaagaagatcctgaaatacgttgattctgctcaagaatttattgcccatttagaagccattgtcagcagtgggaaaactgaaaagtctccccgtgaccaggagatcaaattctttgccaaagttctcctcccgctggttgaccagtacttcaccagtcattgcctctacttcttgtcatcccctctgaagccccttagcagcagcggatatgcctcccataaggagaaagaaatggtggccggcctgttctgcaaacttgccgctctcgttagacacagaatttccctctttggtagtgattctactacaatggtgagctgtcttcacatcttagctcagacacttgacacaaggactgtcatgaagtcaggctcagagctggtgaaggctgggttacgagcattctttgaaaatgctgcagaagatttggagaagacttcagaaaacctgaaacttgggaagttcacccattcccgaacgcagattaaaggcgtttctcagaatattaactacactacagtggctctgctccccatcctgacgtccatctttgagcacgtcactcagcatcagtttggaatggatctactcttgggtgatgtgcagatttcatgctaccacatactgtgcagcctctactcccttgggacgggaaagaacatttatgttgaaaggcaacgccctgcccttggagaatgtctggcctcgctggcagctgccataccagtggcattcctggagcccacccttaatcgctacaatccactctcggtcttcaacaccaaaacccccagggagaggtctattctggggatgccagacacggtagaagacatgtgtcctgacatcccccagctggaaggcctgatgaaggaaatcaacgacctggccgagtcaggggcccggtacacagagatgccccatgtcatcgaggtgatcttacccatgctctgcaactacttgtcctactggtgggagcggggtcctgagaacctgccccccagcacagggccatgctgcaccaaggtcacctctgaacacctcagtctcatcctgggcaacattctgaaaatcatcaacaacaacctgggcatcgatgaggcctcctggatgaagcgcattgcagtgtatgcacagcccatcatcagcaaagccaggcccgacctgctgagaagccacttcatcccaactctggagaagctgaagaaaaaggctgtcaagacggtgcaggaggaggagcagttgaaagccgatggcaaaggggacacccaggaggcagaactcctcatcctggacgagttcgcggtcctctgcagagatctctatgccttctaccccatgctgatccgctacgtggacaacaacagatctaactggctgaaaagtcctgatgctgattctgaccagctcttccgcatggtggcagaagtcttcattctgtggtgtaaatctcataacttcaagagagaagagcaaaattttgtgattcagaatgaaattaataatttggcatttttaactggagacagcaaaagcaagatgtcaaaagccatgcaagtaaagtctggaggacaagaccaggagcggaagaagacaaagcggcggggagacttgtattccatccagacctccctcatcgtggctgcactcaagaaaatgctgcccattggtttgaatatgtgtactccaggcgaccaggagctgatctccctcgcaaaatcgcgatacagccatagggacacagatgaagaggtcagagaacatctgcggaacaacttgcacttgcaggaaaagtctgatgacccagctgtaaaatggcaactgaacctctacaaggatgttctgaagagtgaagaacctttcaatccggaaaagacagtggagcgtgtgcagagaatttcagcagctgtcttccacctggaacaggtggaacagcctttgaggtccaagaaggccgtctggcacaaactgttatcaaagcaacggaaacgggcagtggtggcctgtttcaggatggcccctctctacaacctgcccaggcaccgctctattaacctcttcctccatggctatcagagattttggatagaaacagaggagtattcctttgaagagaaactagtacaggatttggctaaatctccaaaggtggaagaggaggaggaggaagagacagaaaaacaacctgacccactacatcagatcattctctattttagccgcaacgctctcacggagaggagcaaattggaagacgaccctttgtacacctcctattccagcatgatggccaagagttgtcaaagtggtgaggatgaagaagaagatgaagacaaggaaaaaacattcgaagagaaagagatggagaagcaaaaaaccctctatcagcaagctcggctgcatgagcgtggtgctgcagagatggtccttcagatgataagcgctagcaaaggtgagatgagccccatggtggttgagacgctgaagctggggatcgccattctgaacggaggcaatgctggtgtgcaacagaaaatgctagattacctaaaggagaaaaaggatgctggattctttcaaagcctttctggtcttatgcagtcttgcagtgtccttgatttgaatgcatttgagaggcagaataaagctgaaggcctggggatggtgactgaagaaggaacactcattgttcgggaacgtggtgaaaaagtactccagaatgacgagttcacgcgtgatctctttagattcctacagttactttgtgagggacataacagtgactttcagaacttcctgcggactcagatgggcaacaccaccaccgtgaatgtcatcatcagcactgtggactaccttctgcgtctgcaggaatcaatcagtgatttctactggtattattcagggaaggacatcattgatgaatctggacagcacaatttttccaaagctctggcagtcaccaagcagattttcaattctcttacagaatacatccagggcccttgcattggtaatcaacagagcctggctcacagcaggctgtgggacgcagtggttggcttcctccatgtctttgctaatatgcagatgaaactctctcaggattccagtcagatcgagctgctgaaggaactcttggatctccttcaggacatggtggtgatgcttctgtccctcctggaagggaatgtggtaaatggcaccattggcaagcagatggttgacacactggtagaatcatctaccaatgtagaaatgatcttgaaattctttgacatgttcttgaaacttaaagacttaaccagctcagacaccttcaaagaatatgacccagatggtaaaggaattatctccaaaaaagaattccagaaggccatggaagggcaaaaacagtacacgcagtcagagattgactttctcctgtcgtgtgcagaagctgatgagaatgacatgtttaattacgttgattttgtagaccggttccatgagccagccaaggacatagggtttaatgtggctgtgttattgacaaatctttctgaacacatgccaaacgattcccgcctgaagtgtctgttggacccagcagaaagtgtgctaaattacttcgaaccctacctaggacgcatcgagatcatgggtggggccaagaagattgagcgtgtttattttgagatcagtgaatccagtcgcactcagtgggagaagccccaggtgaaggaatctaagcgacagttcatttttgatgttgtcaatgaaggtggggagcaggaaaagatggagctgtttgtgaacttctgtgaggacaccatctttgaaatgcagttagcatctcagatctctgaatccgattcagctgacaggccagaagaggaggaagaagatgaagattcttcttacgtgttagaaattgcgggtgaagaggaagaagacgggtctcttgagccggcctctgcatttgctatggcctgtgcctctgtgaagaggaatgtcaccgacttcctgaagagagcaaccctgaagaacctcaggaagcagtacaggaacgtgaaaaagatgactgcgaaggagctggtgaaggtgctcttctcctttttctggatgctgttcgtggggctattccagttgctcttcaccatcctgggaggaatctttcagatcctctggagcacagtgtttggagggggcctggtagaaggggcaaagaacatcagagtgaccaagatcctgggtgacatgcctgacccaacccaatttggtatccatgatgacactatggaggctgagagggcagaggtgatggagccaggtatcaccactgaactagtacacttcataaagggggagaagggagatacagatatcatgtcagacctctttggactccacccaaagaaagagggcagcttaaagcatgggcctgaagtgggtttgggtgacctctcagaaattattggcaaggatgaaccccctacattagagagtactgtacagaagaagaggaaagctcaggcagcagaaatgaaagcagcaaatgaagcagaaggaaaagtagaatccgagaaggcagacatggaagatggagagaaggaagacaaagacaaagaagaggagcaagctgagtacctgtggacagaagtgacaaaaaagaagaagcggcggtgtggtcagaaggttgagaagccggaagctttcacagccaatttctttaaagggctggaaatctatcagaccaagttactgcattacctggccaggaatttctacaacctgaggttccttgctctgtttgtagccttcgctatcaacttcatcctgcttttttataaggtcactgaagaacctttagaagaagagacagaggatgttgcaaacctatggaattcctttaatgacgaggaagaggaagaagcgatggtattctttgtccttcaggagagcaccgggtatatggcaccaaccctgcgtgccctggccatcatccataccatcatctctctagtctgtgtggtgggctactactgcctgaaggtgcctttggtggttttcaaaagggaaaaagaaatcgccaggaagctggagtttgatggcctatatatcaccgaacagccatctgaagatgacatcaaggggcagtgggaccgcttggtgatcaacacaccatcttttcctaataactactgggacaagtttgtaaagagaaaggtgatcaacaagtatggagatctctacggagcagaacgcattgctgaacttctgggtttggacaaaaatgctcttgactttagcccagtagaagagaccaaagcagaagcggcttctctggtgtcatggctaagttccatagacatgaagtaccatatctggaagcttggagttgtttttactgacaactcctttctctaccttgcctggtatacaaccatgtcagtcctgggccactacaataacttcttctttgctgctcacctattggacatcgcaatgggcttcaagacactgaggaccattctgtcatctgtaactcacaatggcaaacagttggttctgactgtcggtctcctggccgtggtggtttatctctatactgtggtggctttcaacttcttccgcaagttctacaacaaaagcgaagacgatgacgagcccgatatgaagtgcgacgacatgatgacgtgttaccttttccacatgtacgtgggagtgagagcaggaggtggcattggtgatgaaattgaagaccctgctggtgatccttatgaaatgtatcgcattgtctttgacattacctttttcttcttcgtcattgtcatcttgctggccatcattcaaggtcttattattgatgctttcggagagctaagagaccagcaggaacaagtacgagaagatatggagactaaatgtttcatctgtgggattggcaatgactactttgacacaacccctcatggttttgaaacacatacattacaagagcacaacttagccaactacttgttctttctgatgtatttgattaataaagatgaaacagagcacacgggtcaggaatcttatgtctggaagatgtaccaagaaaggtgttgggatttcttcccagccggtgactgctttcgtaaacaatatgaagatcagcttggataaatctgaatcaaagaagcgcgacaattctggacagtcaacttcccatgaaataaagtcccctttttacagttctgcaacatatctgaaatgtgacattttctaaatgcctcccttaaaaaaaaaactgctgaaaatctgtgctattttgaaattgatttggctttttgtgcctaatggacatacactgtgggagagaacctgtcaaaatgtcgaagaaggaaggcgaagaatcaagtaatctctaggcaaatgccttcaagttttccagttctgaggtaactagttcagtttgttgggatggaagcatgaaggaaagggctagagaagtatgaaatctcgaatgtgtaatacctgaaaatttaaacacttgaatgtcatcatggtatccaacttgtgactcatagggtctgaactcactccaaaagataataactgcagtctaatttttcccatggtacttgctagtgactgtatccagaaaagctttaagcagttaaagaaacagaaaaaaaccgacactttgtcgacactgaaatatcgattaagtgccttaaaacctctttagacatagctatgcaagttttttatgtttgtgttccagaaggacagttccattcattagttgtgatcttccgtcttactttatgaaactgcacttgaaggttattcatacaagtttttttagtaacagctgtcagtcaactgctgttattagaagaaaagtactgtactgaaaattcagaaaaaaaatctcaaccttatgccaaaatggagtaatgctttatggtcccttgtaagtagtggagctgctctgtttaggtgaatctcctcaaatacaatgaagtgcccactgcaataaagtaatacgtaccaataaaaa

SEQ ID NO: 57468 - DNA, 5125 bp, Homo Sapiens; identical to SEQ ID NO: 31711

SEQ ID NO: 57469 - DNA, 3390 bp, Homo Sapiens
caggcatcggtgtcgcctcgcagggaacagttgggtggcttccagcttatgccaggagtctcctcctcacccgcacatcgcggggctaggatgggatgtcgtggctgccaaatcctccgaggcaactcctgcctgggacggcctaccacaggatgggcctgagaatccggagcgcaggctcgggccgctaggacaccttcccccgcccgcggacccagccttccagcatcaccggggttcgcggaggagaaagaggaaaggcgtttggcctgccaaggccgccgtagcgagggggcggggcccggaagagcaggatggcggcgcgggacagtgacagcgaagaagatctggtcagctatgggaccgggctggagcctctggaagaaggtgaaagaccaaagaaaccaatccctcttcaggatcagactgtcagagatgaaaaaggaaggtataaacgattccacggggcctttagtggaggtttctctgctggatacttcaatactgttggctcaaaagaaggatggacaccctctacctttgtgtcttcacgacagaacagagcagacaaatctgttcttggtcctgaagattttatggatgaagaggatcttagtgaatttgggatagcacctaaagcgattgtcaccacagacgattttgcctccaaaaccaaagacagaatacgagaaaaggctaggcagttggccgctgctactgcccctattcctggagccaccctccttgatgacctcataacgccagcaaaattatctgttggtttcgaattgctaagaaaaatgggttggaaagaaggacaaggagttggtcctcgagtaaagagacggccacgccgacagaaacctgatcctggagtcaaaatctatggctgtgcattaccccctggaagctcggaaggatctgagggtgaagatgatgactacttgcctgataatgtgacctttgcacccaaagatgtcacacctgtggatttcacacctaaagataatgtgcatggtctagcttacaagggcctggatccccaccaggcactgtttggaacttcgggagaacattttaatcttttcagtggtggttctgagagagctggcgatcttggagaaattggactgaataaaggaagaaaattgggaatttcaggccaggcttttggtgtaggtgccctggaagaggaagatgatgatatctatgccacagaaactctatccaagtatgacactgttctgaaggacgaggagcctggagacggactctatggctggacagcacccaggcagtataaaaaccagaaagaatcagagaaagaccttcggtacgttggcaaaattttggatggattttccttggcttctaaacctttatcttctaagaaaatctatccacctccagagctgccaagagactatcgaccagtgcattatttcagacccatggtggccgccacctccgagaactcacacttactgcaggtattatcagagtcagctggaaaggcaacgcctgacccagggacacacagtaagcaccaactgaatgcctccaaacgggctgagttgcttggagagacgcctattcaaggttcagctacttcagtgttagaatttctgtcccaaaaagacaaagagagaatcaaagaaatgaagcaggcaactgacctgaaagcagctcagctcaaggccaggagtctggcccagaacgctcagagcagcagagcccagctctcccctgcagcggctgctgggcactgctcttggaacatggcattaggtggtgggacggccaccttaaaagccagcaacttcaagcctttcgccaaagatccggaaaagcaaaagcgatacgacgagttcttagtacacatgaaacagggtcagaaagatgctctggaacgctgtctggaccccagcatgacagagtgggagcgaggccgtgagcgggatgagtttgcccgggcggccctgctgtacgcatcttcccattcgaccttgtcctccaggttcactcacgccaaggaggaggatgactcagatcaggttgaagtccctcgagaccaagagaatgatgtcggggataagcagtcggctgtgaagatgaagatgtttgggaagctcacccgagacacgtttgagtggcaccctgacaagcttctatgtaagagatttaatgtccctgacccttatccagattcaactttagttggcttaccaagagtgaagcgtgacaagtactcagtcttcaactttctgacgctcccagagacagcttccttgcccaccactcaagcatcaagtgaaaaagtatcacagcaccgaggtcccgacaaatcaagaaaaccatccagatgggatacctctaaacacgaaaagaaagaagattccattagtgaatttttaagtttggctagatcaaaagccgagccacctaaacaacagtccagccccttagtaaacaaagaggaagagcatgcaccagaattatccgcaaatcagaccgtcaacaaagatgtggacgcacaggctgaaggagaagggagccgcccatccatggacttattcagggccatctttgccagttcctcagatgaaaagtcctcatcctccgaggatgagcaaggtgacagtgaagatgatcaggcaggctctggggaggccaacttccaaagctcccaagacactgacttgggggaaacatcatctgtggctcacgctcttgtgccagcaccccaggagccgccaccttccttcccgatacaaaagatgcagatagatgaaagagaagagttcggcccgcggctgcctcccgtcttctgccccaatgctcgtcagacacttgaggttcctcaaaaagagaaacataaaaagaacaaagacaagcacaaggccaagaaagagcacaggcggaagaaagagaagaaaaagaaacacaggaagcacaaacacaaaggcaagcaaaagaataaaaaaccagagaaaagtagtagctccgagagttccgacagcagcgacagccagagtgacgaggaaaccgcagacgtgtcgccccaggagctgctgagacggctgaaaagtcttccactaagaaggcagtaattgaatgctgccctggctcgtcctagaatcatttctcctccatgatggaagcccagtgattgttcagttaacgcattgtacagagtgtatttatatgtaaattcctgctgtaaaataatttttaaaaccttgacatttcaaagactgccttgaaaggtcgcagaaattgatttctatttttaatttcagttagtatcgggggaaaaaaatccagactgaacagtttaattaaagtggaatttttctattttcaaaaaaaaaaaaaaaaaaaaaaaaaaaa

SEQ ID NO: 57470 - DNA, 3340 bp, Homo Sapiens; identical to SEQ ID NO: 23053

SEQ ID NO: 57471 - DNA, 1188 bp, Homo Sapiens
atggcgccccgaagcctcctcctgctgctctcaggggccctggccctgaccgatacttgggcgggctcccactccttgaggtatttcagcaccgctgtgtcgcggcccggccgcggggagccccgctacatcgccgtggagtacgtagacgacacgcaattcctgcggttcgacagcgacgccgcgattccgaggatggagccgcgggagccgtgggtggagcaagaggggccgcagtattgggagtggaccacagggtacgccaaggccaacgcacagactgaccgagtggccctgaggaacctgctccgccgctacaaccagagcgaggctgggtctcacaccctccagggaatgaatggctgcgacatggggcccgacggacgcctcctccgcgggtatcaccagcacgcgtacgacggcaaggattacatctccctgaacgaggacctgcgctcctggaccgcggcggacaccgtggctcagatcacccagcgcttctatgaggcagaggaatatgcagaggagttcaggacctacctggagggcgagtgcctggagttgctccgcagatacttggagaatgggaaggagacgctacagcgcgcagatcctccaaaggcacacgttgcccaccaccccatctctgaccatgaggccaccctgaggtgctgggccctgggcttctaccctgcggagatcacgctgacctggcagcgggatggggaggaacagacccaggacacagagcttgtggagaccaggcctgcaggggatggaaccttccagaagtgggccgctgtggtggtgccttctggagaggaacagagatacacatgccatgtgcagcacgaggggctgccccagcccctcatcctgagatgggagcagtctccccagcccaccatccccatcgtgggcatcgttgctggccttgttgtccttggagctgtggtcactggagctgtggtcgctgctgtgatgtggaggaagaagagctcagatagaaacagagggagctactctcaggctgcagtcactgacagtgcccagggctctggggtgtctctcacagctaataaagtgtgagacagcttccttgtgtgggactgagaagcaagatatcaatgtagcagaattgcacttgtgcctcacgaacatacataaattttaaaaataaagaataaa

SEQ ID NO: 57472 - DNA, 1639 bp, Homo Sapiens
agcgggggcgggctctctgacgaaggactggaaggtggcggtggtgaaggtgcaggccgttggggcggctcagaggcaggtgactatgaaaggcttatatttccaacagagttccacagatgaagaaataacatttgtatttcaagaaaaggaagatcttcctgttacagaggataactttgtgaaacttcaagttaaagcttgtgctctgagccagataaatacaaagcttctggcagaaatgaagatgaaaaaggatttatttcctgttgggagagaaattgctggaattgtattagatgttggaagcaaggtatcattctttcaaccagatgatgaagtagttggaattttgcccctggactctgaagaccctggactttgtgaagttgttagagtacatgagcattacttggttcataaaccagaaaaggtcacatggacggaagcagcaggaagcattcgggatggagtgcgtgcctatacagctctgcattatctttctcatctctctcctggaaaatcagtgctgataatggatggagcaagtgcatttggtacaatagctattcagttagcacatcatagaggagccaaagtgatttcaacagcatgcagccttgaagataagcagtgccttgaaagattcagacctcccatagcccgagtgattgatgtatctaatgggaaagttcatgttgctgaaagctgtttggaagaaacaggtggcctgggagtagatattgtcctagatgctggagtgagattatatagtaaagatgatgaaccagctgtaaaactacaactactaccacataaacatgatatcatcacacttcttggtgttggaggccactgggtaacaacagaagaaaaccttcagttggatcctccagatagccactgccttttcctcaagggagcaacgttagctttcctgaatgatgaagtttggaatttgtcaaatgtacaacagggaaaatatctttgtatcttaaaggatgtgatggagaagttatcaactggtgttttcagacctcagttggatgaacccattccactgtatgaggcaaaagtttccatggaagctgttcagaaaaatcaaggaagaaaaaagcaagttgttcaattttaattttcttctttctcagacctcagtcggatgaacatattccagtatttgaagccagaattttctttggaaattgttgagaaaaaccaaggaagataaaacaagttgcatttttaagcacgtttctctgctaagacaagatgctcagttgacacatttgaaaagtgtttgaaaaattcttgtgcaaatgatcaagataattctataattaacatcttaagggaatttttctaaaaaccttttcattgtttctatatattttgcccctgctataaaattccttccatgaagaaaactgctgctttcagcaaaagtcacactactcttgataaaagctgttgcaggcctttgctaagctatcaaagtaacgtattaattttgtatcaactccgttctcaacaccttccttaagtctttgctgtcataatttaagcatttgagtatattttgaagtcttaaaagacttagcccataggcacttaaaaaaaaaaaaaaaaaaaaaaaaaa

SEQ ID NO: 57473 - DNA, 2558 bp, Homo Sapiens
ttgtgctcctcgcttgcctgttccttttccacgcattttccaggataactgtgactccaggcccgcaatggatgccctgcaactagcaaattcggcttttgccgttgatctgttcaaacaactatgtgaaaaggagccactgggcaatgtcctcttctctccaatctgtctctccacctctctgtcacttgctcaagtgggtgctaaaggtgacactgcaaatgaaattggacaggttcttcattttgaaaatgtcaaagatataccctttggatttcaaacagtaacatcggatgtaaacaaacttagttccttttactcactgaaactaatcaagcggctctacgtagacaaatctctgaatctttctacagagttcatcagctctacgaagagaccctatgcaaaggaattggaaactgttgacttcaaagataaattggaagaaacgaaaggtcagatcaacaactcaattaaggatctcacagatggccactttgagaacattttagctgacaacagtgtgaacgaccagaccaaaatccttgtggttaatgctgcctactttgttggcaagtggatgaagaaatttcctgaatcagaaacaaaagaatgtcctttcagactcaacaagacagacaccaaaccagtgcagatgatgaacatggaggccacgttctgtatgggaaacattgacagtatcaattgtaagatcatagagcttccttttcaaaataagcatctcagcatgttcatcctactacccaaggatgtggaggatgagtccacaggcttggagaagattgaaaaacaactcaactcagagtcactgtcacagtggactaatcccagcaccatggccaatgccaaggtcaaactctccattccaaaatttaaggtggaaaagatgattgatcccaaggcttgtctggaaaatctagggctgaaacatatcttcagtgaagacacatctgatttctctggaatgtcagagaccaagggagtggccctatcaaatgttatccacaaagtgtgcttagaaataactgaagatggtggggattccatagaggtgccaggagcacggatcctgcagcacaaggatgaattgaatgctgaccatccctttatttacatcatcaggcacaacaaaactcgaaacatcattttctttggcaaattctgttctccttaagtggcatagcccatgttaagtcctccctgacttttctgtggatgccgatttctgtaaactctgcatccagagattcattttctagatacaataaattgctaatgttgctggatcaggaagccgccagtacttgtcatatgtagccttcacacagatagacctttttttttttccaattctatcttttgtttccttttttcccataagacaatgacatacgcttttaatgaaaaggaatcacgttagaggaaaaatatttattcattatttgtcaaattgtccggggtagttggcagaaatacagtcttccacaaagaaaattcctataaggaagatttggaagctcttcttcccagcactatgctttccttctttgggatagagaatgttccagacattctcgcttccctgaaagactgaagaaagtgtagtgcatgggacccacgaaactgccctggctccagtgaaacttgggcacatgctcaggctactataggtccagaagtccttatgttaagccctggcaggcaggtgtttattaaaattctgaattttggggattttcaaaagataatattttacatacactgtatgttatagaacttcatggatcagatctggggcagcaacctataaatcaacaccttaatatgctgcaacaaaatgtagaatattcagacaaaatggatacataaagactaagtagcccataaggggtcaaaatttgctgccaaatgcgtatgccaccaacttacaaaaacacttcgttcgcagagcttttcagattgtggaatgttggataaggaattatagacctctagtagctgaaatgcaagaccccaagaggaagttcagatcttaatataaattcactttcatttttgatagctgtcccatctggtcatgtggttggcactagactggtggcaggggcttctagctgactcgcacagggattctcacaatagccgatatcagaatttgtgttgaaggaacttgtctcttcatctaatatgatagcgggaaaaggagaggaaactactgcctttagaaaatataagtaaagtgattaaagtgctcacgttaccttgacacatagtttttcagtctatgggtttagttactttagatggcaagcatgtaacttatattaatagtaatttgtaaagttgggtggataagctatccctgttgccggttcatggattacttctctataaaaaatatatatttaccaaaaaattttgtgacattccttctcccatctcttccttgacatgcattgtaaataggttcttcttgttctgagattcaatattgaatttctcctatgctattgacaataaaatattattgaactacc

SEQ ID NO: 57474 - DNA, 2164 bp, Homo Sapiens
agtggcgctgctgggacgggggaaaggagacgcttcttcctcttgctgctcttctcgttcccgagatcagcggcggcggtgaccgcgagtgggtcggcaccgtctccggctccgggtgcgaacaatgctgactgatagcggaggcggcggcacctcctttgaggaggacctggactctgtggctccgcgatccgccccagctggggcctcggagccgcctccgccgggaggggtcggtctggggatccgcaccgtgaggctctttggggaggccgggccagcgtcgggagtcggcagcagcggcggcggcggcagcggcagcggtacgggcggaggggacgcggcgctggatttcaagttggcggctgccgtgctgaggaccgggggtggaggtggtgcctctggcagtgacgaggacgaagtgtccgaggttgaatcatttattttggaccaagaagatctggataacccagtgcttaaaacaacatcagagatattcttatcaagtactgcagaaggagcagacttacgcactgtggatccagagacacaggcacgactagaagcattgctagaagcagcaggaattggcaaattgtcaactgctgatggtaaagcttttgcagatcctgaggtactccggagactgacatcctcagttagttgtgcactggatgaagctgctgctgcactgacacggatgaaagcagaaaacagccacaatgcaggacaagtggacactcgcagtctagcagaagcttgttcagatggggatgttaatgctgttcgtaaattgctagatgaaggcagaagtgtaaatgaacatacagaagaaggagaaagcctgctgtgtttggcttgttcagcagggtattatgaattagcacaagtattgcttgctatgcatgctaatgttgaagatcgagggaataaaggagacataactcccctgatggcagcttccagtggaggttacttagatattgtgaaattattacttcttcatgatgctgatgtcaactcccagtctgcaacaggaaacactgcgctaacttatgcatgtgctggaggatttgttgacattgttaaagtgctccttaatgaaggtgcaaatatagaagatcataatgaaaatggacatactcccttaatggaagcagccagtgcaggtcatgtggaagttgcaagagttcttttagatcatggtgcaggcatcaacactcattctaatgaattcaaagaaagtgctctaacacttgcttgctacaaaggccatttggatatggttcgctttctacttgaagctggtgcagatcaagagcacaaaacagatgagatgcacactgccttaatggaggcctgcatggatggacatgtagaggtggcacgtttgcttttggatagtggtgctcaagtgaacatgcctgcagattcatttgaatctccattgacgctagctgcctgtggaggacatgttgaattggcagctctacttattgaaaggggagcaaatcttgaagaagttaatgatgaaggatacactcccttgatggaagctgcccgggaaggacatgaagaaatggtggcactactcttagcacaaggagcaaatataaatgcccagacagaagaaactcaagaaactgctcttactttggcttgctgtggaggattttctgaagttgcagactttcttattaaggcaggggctgatatagaacttggctgctccacacctctgatggaggcatctcaggagggacacctggaattggttaaatatttgctggcttctggcgctaatgtgcatgctacaacagcaacaggagacacagccttaacctatgcttgtgaaaatggacatacggatgttgcagatgttttacttcaagcaggggctgatttagacaagcaggaggacatgaagactattttggagggcatagatccggccaagcatcaggtgagggtggcctttgatgcttgtaagctactacgtaaagaatagatgttgtaggtaaccagaactctggatatctgaattccagccaagaagttccaggaccctgctgggtgacaaaggaaatcctcttcaattgaaaaagattatgaagtcccaataaaaagagatttgtattgctggtaaaaaaaaaaaaaaaaaaaa

SEQ ID NO: 57475 - DNA, 2636 bp, Homo Sapiens
gcttcccggaagtggcggcgcggtcagggctggccttggcttcagctgcggttttggggtcccggactctgggatcggcggcgctatgagttctttcgaggggcagatggccgagtatccaactatctccatagaccgcttcgatagggagaacctgagggcccgcgcctacttcctgtcccactgccacaaagatcacatgaaaggattaagagcccctaccttgaaaagaaggttggagtgcagcttgaaggtttatctatactgttcacctgtgactaaggagttgttgttaacgagcccgaaatacagattttggaagaaacgaattatatctattgaaatcgagactcctacccagatatctttagtggatgaagcatcaggagaggtttttatttcagggcaataatggaactgtcctgtacacaggagacttcagattggcgcaaggagaagctgctagaatggagcttctgcactccgggggcagagtcaaagacatccaaagtgtatatttggatactacgttctgtgatcgaagattttaccaaattccaagtcgggaggagtgtttaagtggagtcttagagctggtccgaagctggatcactcggagcccgtaccatgttgtgtggctgaactgcaaagcggcttatggctatgaatatctgttcaccaaccttagtgaagaattaggggtccaggttcatgtgaataagctagacatgtttaggaacatgcctgagatccttcatcatctcacaacagaccgcaacactcagatccatgcatgccggcatcccaaggcagaggaatattttcagtggagcaaattaccctgtggaattacttccagaaatagaattccactccacataatcagcattaagccatccaccatgtggtttggagaaaggagcagaaaaacaaatgtaattgtgaggactggagagagttcatacagagcttgtttttcttttcactcctcctacagtgagattaaagatttcttgagctacctctgtcctgtgaacgcatatccaaatgtcattccagttggcacaactatggataaagttgtcgaaatcttaaagcctttatgccggtcttcccaaagtacggagccaaagtataaaccactgggaaaactgaagagagctagaacagttcaccgagactcagaggaggaagatgactatctctttgatgatcctctgccaatacctttaaggcacaaagttccatacccggaaacttttcaccctgaggtattttcaatgactgcagtatcagaaaagcagcctgaaaaactgagacaaaccccaggatgctgcagagcagagtgtatgcagagctctcgtttcacaaactttgtagattgtgaagaatccaacagtgaaagtgaagaagaagtaggaatcccagcttcactgcaaggagatctgggctctgtacttcacctgcaaaaggctgatggggatgtaccccagtgggaagtattctttaaaagaaatgatgaaatcacagatgagagtttggaaaacttcccttcctccacagtggcagggggatctcagtcaccaaagcttttcagtgactctgatggagaatcaactcacatctcctcccagaattcttcccagtcaacacacataacagaacaaggaagtcaaggctgggacagccaatctgatactgttttgttatcttcccaagagagaaacagtggggatattacttccttggacaaagctgactacagaccaacaatcaaagagaatattcctgcctctctcatggaacaaaatgtaatttgcccaaaggatacttactctgatttgaaaagcagagataaagatgtgacaatagttcctagtactggagaaccaactactctaagcagtgagacacatatacccgaggaaaaaagtttgctaaatcttagcacaaatgcagattcccagagctcttctgattttgaagttccctcaactccagaagctgagttacctaaacgagagcatttacaatatttatatgagaagctggcaactggtgagagtatagcagtcaaaaaaagaaaatgctcactcttagatacctaagaattcaaagcgtttcaacctagagcaaccactaaaaaacctgcacagagatgacagtcaatattacaatagagaaaatacagtacttaaaaatgttcaaataacctggttgggtgtggtggctcacacttgtaatcccagcactttgaggtgggcaatggcttgagcccaggagttcgacaccagcctggccaacacagtgaaatgtgtctctacttacaaaaaaaaaaaaaaaaaaaaagccaggcatggtggtgggctactctggaggcccttgaggaccacttgagcccaggagattgaggctgcagtgagccatgactgtgccactgcacctctagtctgggtgacagagcaagaccctgtttaaaaaagaaaaaggccaggcacggtggctcatgcctgtaatcccagctacgcaggaggccaaggcaggagaatcacttgaacctgggaggtggtggttgcagtgagctgagattgtgtcattgcactccagcctgggcaacaagagcaaaactctgtctc

SEQ ID NO: 57476 - DNA, 4744 bp, Homo Sapiens; identical to SEQ ID NO: 29219

SEQ ID NO: 57477 - DNA, 2412 bp, Homo Sapiens; identical to SEQ ID NO: 30456

SEQ ID NO: 57478 - DNA, 6388 bp, Homo Sapiens
ctcgcttttcttgcaatattttataccttttcaattcatagaattactcaagaaaactacctcagttggttgctactttttgttgattccttttaccagacatgactaagtttctttttcatcagtagatttctgggctcctatattcactagagattgcaactcctggatttctcttacactagaatcctatttcgagccatatgggagattctgaattccagaacaaaagaattttgtaatttaaaattcgtgattgctcaatggaatcattttaattgttacttcatttctgtcgttatttaaaacttaagtggagagttttctcagggataagaaaaccacaatcaaggtcatacaaaacttttagaggcagtcagtctgctaagaaggctccagcaagagaaacgggatcttctgtttcaacaatcattacttaagaaaaaattaagaaaatgaaataagttttgcagaataactgtgaaatttttattcatgaaatatgtacttacactttgggccacgtgatgtcactctttgccgcgatgttctctctgaatccagacaaatacagcccttttcccatgggaaagaggctcaattctttttcactctctctgtgctgaacgatggcgaacacagcagaatgggactgacgaaatcagatgatttcttctaatttggaggcaattttcactaattagaagaagactgagtatttgaaatgttatactcaagtcgaggagatccagagggtcagcctctactgctctcgcttctgatcctcgcaatgtgggtggtggggagcggccagctccactactccgtcccggaggaagccgaacacggcaccttcgtgggccgcatcgcgcaggacctggggctggagctggcggagctggtgccgcgcctgttccagttggattccaaaggccgcggggaccttctggaggtaaatctgcagaatggcattttgtttgtgaattctcggatcgaccgcgaggagctgtgcgggcggagcgcggagtgcagcatccacctggaggtgatcgtagacaggccgctgcaggttttccatgtggacgtggaggtgaaggacattaacgacaaccctccagtgttcccagcgacacaaaagaatctgttcatcgcggaatccaggccgcttgactctcggtttccactagagggcgcgtccgatgcagatatcggggagaacgccctgctcacttacagactgagccccaatgagtatttcttcctggacgtgccaaccagcaaccagcaggtaaaacctcttggacttgtattacggaaacttttagacagagaagaaactccggagcttcatttattgctcacggccaccgatggaggcaaacccgagctgactggcaccgttcaattactcatcacggtactggacaacaatgacaatgccccagtgttcgacagaaccctgtatacggtgaaattaccagaaaacgtttctatcggaacgctggtgattcaccccaatgcctcagatttagacgaaggcttgaatggggatattatttactccttctccagtgatgtttctccagatataaaatccaagttccacatggaccccttaagtggggcaatcacagtgataggacatatggattttgaagaaagtagagcacacaagatcccagtcgaggctgtcgataaaggcttcccacccctggctggtcattgtacacttcttgtggaagttgtggatgtaaatgacaatgctccacagttgactatcaaaacgctctcggttcctgtaaaagaggacgcacaactggggacagttattgccctgattagtgtgatcgacctagacgcagatgccaacgggcaggttacctgctccctgacgccccacgtccccttcaagctggtgtccacctacaagaattactactcgttggtgctggacagagctctggaccgcgagagtgtgtccgcctacgagctggtggttaccgcgcgggacgggggctcgccttcactgtgggccacggccagggtgtctgtggaggtggccgacgtgaacgacaacgcaccagcgttcgcgcagtccgagtacacggtgttcgtgaaggagaacaacccgccgggctgccacatcttcacggtgtctgcgcgggacgctgacgcgcaggagaacgccctggtgtcctactcgctggtggagcggcggttgggcgagcgctcgctgtcgagctacgtgtcagtgcacgcggagagcggcaaggtgtacgcgctgcagccgttggaccacgaggagctggagctgctacagttccaggtgagcgcgcgcgacgcgggcgtgccgcctctgggcagcaacgtgacgctgcaggtgttcgtgctggacgagaacgacaatgcgccggcgctgctgacacctcggatgaggggcactgacggcgcagtgagcgagatggtgctgcggtcggtgggcgccggcgtagtggtggggaaggtgcgcgcagtggacgccgactcgggctacaacgcgtggctttcatacgagctgcagccagaaacggccagcgcgagcatcccgttccgcgtggggctgtacacgggcgagatcagcacaacgcgtgccctggacgaaacggacgcaccgcgccagcgcctactggtgctggtgaaagaccacggggagccagcgctgacggccacggccactgtgctggtgtcgctggtggagagcggccaggcgccaaagtcatcgtcgcgggcgtcagtgggtgccacgggccccgaggtgacgctggtggatgtcaacgtgtacctgatcatcgccatctgcgcggtgtctagcctgttggttctcacgctgctgctgtacactgtgctgcggtgctcggcgatgcccaccgagggcgagtgcgcgcctggcaagccgacgctggtgtgttctagcgcggtggggagttggtcgtactcgcagcagaggaggcagagggtgtgctctggcgagggtaagcagaagaccgacctcatggccttcagcccgggcctttctccttgtgctggatctacagagcgaacgggagaaccctctgcttcctcagattcaactgggaaggtgggtttttctagcattttatttatttatataattttttttcttgaaagatattatcgattactcccaggggccgttcaaatagttttattcatttttctagaaatccagcagattttttttctgataaagtaaaccccttaacattggagccgactttgtcttgacttctagtgagaattataaactgtatattaaatagatattttttgggtgctgaatcaattttatttaaatttgtgattaaagtgacattgaatttctgatgctatgctgccataacacttgaaaaccaatttagttgttagtcattcattaaacattaacatcactatcatttatttattgctaaatgatgcatagtattttagtctacttgtattgtttataagaaacccaagcaaaaatatatagcaattgttaccttgttaagtttgtagttctctacatttctctggatggagactgtgaacatctgattgttcagcaaccttcagtatctattattttaataagaaagaaacttcccctaaactttagaaaacagttgctccactttaggaatcaaattatgtcaataaatgttataaacacagccttcatttcaacttatataaaatatgttttaaaatgcctgacaatgtagataattcaagaaatgttgactgaaattttgtctacacttagaacattttttgaaattcagtttacagaaattggagaaaatgctttttaaacaagtgtttcctttcttcaagaagatattctccttttaattgaaattttctccattcagtgataaaatgatcagccatgtgaagattcgaaacttcgagttcttttgaaattcagagtctgtaacttaaaacattacccttatgaatttagatgagaattcacttgttctgtcagtaatccataagacagaaatctgtttttttaaaaatatctttttctcctctcagctcatacataacacaaggcagaaatctggatatgagatttgcctctttaatgtcactacatgttatgtttcctgaattgtagtatgtgactttcaaaatggtggttttccacactctacctttagtgcaagctatttgtttgttttctaatttatagttttaaaaacttcgcttattgagtttttgttatgtggtttatatttttctttctctttcagctattttatttaatattgtgtcagatattttacaaggtatgacctaattaaaaactcagtagagaaagatcagaatggccttgagaatagagccacaaaaataactatgaaaatgccagtaacgtttatttaaaacaaaatattttaatttttaaattttcccttaaaacacacttttggaatatgctacaatattacatgttttttgtctttttatttttctgagacggagtcgttttctgccacccaggctggagtacagtggcatgatcttggctcactgcaacgtctgcctcctgggttcaagcaattctcctgcctcagcctcctgagtagctgggattataggcacatgccaccgcgcccagctaatttttgtatttttagtagagatggggtttcatcatgttggccaggttggtctcgaactcctgaccttgtgatgctcccacctcggcctcccaaagtgctgggattaaagctgtgagccactgtgccaaggcttttttattttttttttttgtcattttctttcaaaacttgagtggtctctgagctcctgtcattaaacctatctatatctgtctatcagcacaactcaccttgaatatagtcttatactttcaagtatctttgtctttgcacgtttttcaagtttcatgtgccatttaaacttggacccaggtatctgattatttgatgtgaatagagggatgctacagatgtcatttgtctcccgccctaagtcctccagtctccttagagctagtacttactaagcatttactatgtcatcaataatcataaaacgtatttttttttttgagtcagagtctcgctctgttgcccaggctggagtgcagtggtgccatcttggctcactccaagctccccctcccgtgttcacgccattctcctgcctcagcctcccgagtagctgggactacaggcgcctgccaccatgcccgcctaatttttttgtatttttagtagagatggggtttcaccgtgttagtcaggatggtctcgatctcctgacctcatgatcctcccgcctcagcctcccaaaatgctgggattacaggcgtgagccaccgcgcctggcctaaaatgtgttctttattattgacggctgtattgatgggattggtaatttagtccttcatattaatctctattctctctcagagtacaagctctcatcatatgcaaattctcagaagggctgtgaacaccttagtaataaatttatcttttgaggtcattagcaaacatgaactcacagggatccagagatggtaaaattcaaaacagcctgtcaagttcaaaacagagaggtgaaagcagaagagacactttcctattttgcctaataggtctccttatatgcatctgtagttaacattcctcaattcaagttagaatcatgaaacaataatgaagctcctcctatgtctcttttcaagttgtaattactatataggaaaaactaagttgtcacccaatatcttagacactttgagagcaaagggggtgctgtaaataagtatacaagatcacagacctaaattgagcctgttccagacaaattggggcctatggtcaacctatccttagacctgctaacgcattagcattagcagcacctaagtcctcattgaatgttctggttcaaggctccacctcagaaattctgaaatgggtagtaagagcaaattttcattttaaagcacacctgagatgattctcatacaaccgaaattttagatccatagccctatttgatacttgacagtgcaagtttctgtaatttaaaaagatgtggtggcctgacacctgcaatcccaacattttgggaggccaaggtgggagggtcccttccttgagcccagcagtttgagaccaatgtagtgagactcatctctgccaaaaaaaaaaaattagccgggcatggtggcacacatctctagtcccaattactcaggaggctgaggcgagagaatcgcttgagcctgggacattgaggctgcagtgaactgtgatggcacaactgcatttcagcccgggagacagcaagattctgtctc

SEQ ID NO: 57479 - DNA, 5480 bp, Homo Sapiens
cgcctctcttcccccacccggagtggccggcagtccccggcaggcgtgcgccgggcagcagacagccgggagagctcgagcgccaggaagctggggacccgtgaccgtcacggagagatagagaacccctagcggacctgaggaacctgggctctgcttcctccgcctgctgcctggactgctcagtgaggtggggggatccccggccaccggtgctgtggctgtagctgacctctttggaccgggatgtgggtatcctgggctcctggcctgtggctgctcggtctttgggctaccttcggccatggggcaaatacaggtgcacaatgcccaccttcacagcaggaaggactcaaattggaacacagtagtagcctgccagccaacgtgactggcttcaacctcatccaccgactcagcctcatgaagaagtctgccatcaagaagatccgcaaccccaaggggcctctcatcctgcgcctgggggcggcccccgtgacccagcccacgcgacgagtattccctcggggtctcccggaggagtttgccctggtgctgacactactgctgaagaaacacacccaccagaagacgtggtatctgtttcaagtgaccgatgcaaatgggtatccacagatatccctggaagtcaacagccaagagcggagcctggagctcagggcccagggccaggatggcgactttgtgtcctgcatcttcccagtgccccagctcttcgacttgcgttggcacaagctgatgctgagtgtggctggacgtgtggcctctgtgcacgtggactgcagctcagcctcctcccagcctctggggccccgacgacccatgaggcctgtgggccatgtatttctaggcttggatgctgagcagggcaagcctgtctcgtttgaccttcagcaggtgcacatctactgtgacccggagctcgtgctggaggagggctgctgtgagattttaccagcagggtgccccccagagacctccaaggcccgccgggacacccagagcaatgagctcattgagatcaatccacagtctgaaggcaaggtctacacccgctgcttctgcctggaggagcctcaaaacagcgaggtggatgcccagctgacgggaagaatcagccagaaggcagaaaggggagcaaaggtccatcaggagacagcagccgatgagtgtccgccctgtgtccatggtgcccgggacagcaatgtcacacttgctccctctggccccaagggagggaaaggtgagcggggcctgcctggtccaccaggctccaagggagagaagggagcacggggcaatgactgtgttcgaatctccccggatgccccgcttcagtgtgcagaaggcccgaagggagagaagggggagtcaggagctctgggaccctcaggactcccaggctcaacaggcgagaagggccagaaaggcgagaagggcgacggaggcatcaagggcgtgccgggaaagccaggccgggacgggccaggagagatctgtgtcattgggcccaaagggcagaagggagaccctggctttgttgggcctgaggggctggcaggagagcctgggccccccggcctccctggaccccctgggataggactgcctgggaccccgggggatccaggtggcccaccaggccccaagggagacaagggcagctcggggatcccaggaaaggaaggccctggtgggaaacctgggaagccaggtgtgaagggagagaagggtgacccctgtgaagtgtgcccaacactgcctgaagggttccagaactttgttggacttcctggaaagccagggcccaaaggggagcctggtgatcctgtacgagccaggggagaccctggcatccaaggcatcaaaggagagaagggggagccctgcttgtcctgcagctcggttgtaggggcccagcatcttgtgtcctccacaggggccagtggagatgtgggttcccctggctttggtctgcctggccttccgggtagagctggggttccagggctgaaaggagagaagggtaacttcggggaggcagggccagctggcagtccagggccaccaggaccagtggggccagcaggcatcaaaggggcgaagggggagccctgtgagccgtgcccagccctgtccaaccttcaggatggggatgtccgtgtggtggccttgcctggcccatccggagagaagggggaacctgggcctccaggctttggcttgccaggaaaacagggcaaggctggagagcgtggactgaaggggcagaagggtgatgctgggaatcctggagaccctggaacgccgggcaccacagggcggccaggactgtcaggagagcctggagttcagggccccgcggggccaaaaggagaaaagggtgatggctgcactgcctgccccagcctgcaggggacagtgacagacatggcaggacggcctgggcagcccgggcccaaaggagagcagggccccgaaggcgtgggccgacctggtaaacccggccaacccggtctaccaggagttcaagggcccccaggactgaagggcgtgcagggagagccagggcctccaggaaggggagtccagggaccccagggggagcctggagccccgggtttgcctggcattcagggacttccgggacctcggggaccacctggccccactggagagaagggtgcccagggatctccaggggtgaaaggagccaccggacccgtgggacctcctggggccagtgtctctgggcctccgggccgtgatgggcagcaaggacagacgggactcagaggaacaccaggtgaaaaaggaccacgaggagagaagggtgagccaggggagtgctcctgcccctctcaaggagacctcatcttctctggcatgccgggtgctccgggactttggatgggcagctcctggcagccgggcccgcagggtccaccaggtattcccggaccaccaggcccccctggagtacctgggctgcagggagtgcctggaaacaacggtttgccaggacagcctgggctcactgcagaactgggatccttaccaattgaacagcacctccttaagagtatctgcggggactgtgtccaggggcagagggcccacccagggtacctcgtggagaagggagagaagggagaccagggcatccctggtgtgccaggcctcgacaactgcgcccagtgctttttgtcactggagcgcccaagagccgaggaggcccggggtgacaacagtgagggagatcctggctgtgttgggagcccaggcctacctggtcctccgggattgccaggccagagaggagaagagggtccgcctggcatgaggggctccccgggtcctccaggccctatcggccccccaggttttcctggtgctgttggctcccccggattgcctggccttcaaggagagcgaggtctcacgggcctgactggagacaagggggagccgggtcctccagggcaaccaggttacccaggtgccacgggccccccaggactgcctggcatcaagggggagcgtggctacaccgggtcagcgggagagaaaggagagccgggccccccaggatctgaaggcctcccaggccccccaggcccagcgggtcccagaggagagcgaggaccccaaggtaactccggtgagaagggcgaccagggatttcaaggccagccaggctttaccgggcccaccgggtcccctggattcccaggcaaagttggatcacctggcccacctggccctcaagcagagaagggcagcgaagggattcgaggcccatcaggcctgcctggctcccctgggccaccgggacctcctgggattcagggccccgccggtctggatggtttggatgggaaggacggcaagcctggcttgaggggggaccctggtcctgctggcccccctggactcatgggaccaccgggctttaaggggaaaacaggacatcctggcctcccaggacctaagggtgactgtggcaaaccaggtccccctggcagcactggccggcctggcgcagagggtgaacctggtgccatgggaccccagggaagacccggtcccccgggacacgttgggccaccagggcctccaggccagccaggaccagctgggatctctgcagtgggtctgaaaggagaccgaggagccaccggagaaaggggccttgcaggcctcccaggccagcccggcccccctggacaccctggccccccaggcgaacctggtacggatggtgcagctggcaaagagggaccccctggaaagcagggattctatggacctcctggtcccaagggtgatccaggagctgcaggacagaagggccaggcaggagagaaggggagagccggcatgcctggtggacctggcaagagtggttccatggggcctgttgggccaccgggccctgcaggagagagaggccaccctggagctccggggccttcggggagccctggcttgcctggtgtgcctggctccatgggagacatggtgaattatgatgaaatcaagaggttcatcagacaagagatcattaaaatgtttgatgagagaatggcttactacacctccaggatgcagttccccatggagatggcggcagctccgggacgaccagggcctccagggaaggatggtgctccgggcaggccaggtgctccagggtcacctgggctccctggtcagattggcagagaaggacggcagggcttgccaggagtaagaggattgcctggtaccaaaggtgaaaaaggggacattggtattggcattgcaggagaaaatggtcttcccggccccccaggtcctcaaggtcctccaggctatggcaagatgggtgcaacaggaccaatgggccagcaaggcatccctggcatccctgggcccccgggtcccatgggccagccaggcaaggctggccactgtaatccctctgactgctttggggccatgccgatggagcagcagtacccacccatgaaaaccatgaaggggccttttggctgaaattccccacctgcctttggatgaaagactccgttgggaataaatggccaaagcttataggactctgtgacaggttgtgaatgttttttttttttgttgttgttgtttttaattgctgttaatattttttaaataataaagaaacaaaactatctgccctttcccttccagtgggttcctctggtgctgcagccagagctccctgttgccctccttttcccgtttagtcccaggaacaaaaagggcatttgggtacaggggcatatacctgtaatcctagctattcaaggggctgaggtgggaggatcgcctgagcccaggagtttgagaccagtctaagcaacataatgagactcagtctccgaaaaataaaaattaaaaaataaagggtatttccctccttaaaaaaaaaaaaaaaaaaa

SEQ ID NO: 57480 - DNA, 2040 bp, Homo Sapiens
ccatggctcagcctctgggtccagagcctcagctcctacctcttccctccttgccagcccctgatgcctgccagacttttgcctctgctggagcccctgcctgaccagcttcccctccctgtctggttgggatttgggggctgagctgtctggggtcccagggccaaccaatgcagtgccggctcccgcggggcctggctggagccctcctcaccctcctgtgcatggggctcctgtgtctgcggtaccacttgaacctgtccccgcagcgggtacaagggacccccgagctgagccagccgaacccggggccccctaagctacagctacacgatgtcttcattgcagtgaagacgacccgggctttccaccgcttgcgcctggagctgctgcttgacacgtgggtttccaggaccagggaacagacatttgtcttcaccgacagcccagacaaaggcctccaggagagactggggtcccaccttgtggtcaccaactgctccgcggaacacagccacccagctctgtcctgcaagatggctgctgagttcgacaccttcttggccagtgggcttaggtggttctgccatgtggacgatgacaactatgtgaacccaagggcgctgctgcagcttctgagagccttcccgctggcccgcgacgtctatgtgggaaggcccagcctgaaccggcccatccatgcctcagagccacagccccacaaccgcacgaggctggtacagttctggtttgccactgggggtgctggcttctgcatcaatcgcaaactggctttgaagatggctccgtgggccagtggctcccgtttcatggacacatctgctctcatccggctgcctgatgactgcaccatgggctatatcattgagtgcaagctgggcggccgcctgcagcccagccccctctttcactcccacctggagaccctgcagctgctgaggactgcacagctcccagaacaggtcaccctcagctacggtgtctttgaggggaaactcaacgtcattaagctacagggccccttctccccggaggaggacccctccagatttcgctccctccattgtctgctctatccagatacaccctggtgtccccagctgggtgcccgatgaatcctgaactgctgggcaaaggttgggcagagacttctgggtgtgccttggctcccaaggtggcactgtgggtccctggcaagtgtcttgtgataggcagtccctggcagggccttcgggtggttggcaagcccaggatctgagtggcaattggcactgaaggcaccccaggcccctgggaggtgagttagacagcccaggggaccaggtggaccaggtggtggccagagaggctccaggggctagactccctcaggaggctgaattgaaaaagggcagggggcacttgagctgggctggggctcaggggtcctaaccctttaggcagtgacatggcctctgggtggggtctggccgttggccctggctaatgtctctcagtcattcccctggggctcaagcgctgggccgcccactcctgcctccctcatctgtgtcccgagttcctgaagggacatgggtggaatgatggcagaatccagggtctgcagcacctgctgttgttgccaaccagtctcccaaagctccttgctccccaccccttgcgaacaggaccagattttgtttggagcctcagcatgccggggcccagatgatggagcataacgggtcccagccaattgtgatgatcctttttgctcatttcccagcctttcttgctgttaggggctaccatgggaccagctctggccagagggaactaagcaaatccaatagagatgtttctggggaaggttttgcagcccactccccatcttcctgctataaatgtgggtgtgatggctggatctggggcagccaccttgctaccatgaaggaaaggccaagacaatcatccacagctattccctccagcatctggttctgtacaaaaattaaatgcttatttgtttaagtcaaaaaa

SEQ ID NO: 57481 - DNA, 1328 bp, Homo Sapiens
ccgcagcccatcggcatggctcaagagtttgtgaactgcaaaatccagcctgggaaggtggttgtgttcatcaagcccacctgcccgtactgcaggagggcccaagagatcctcagtcaattgcccatcaaacaagggcttctggaatttgtcgatatcacagccaccaaccacactaacgagattcaagattatttgcaacagctcacgggagcaagaacggtgcctcgagtctttattggtaaagattgtataggcggatgcagtgatctagtctctttgcaacagagtggggaactgctgacgcggctaaagcagattggagctctgcagtaaccacagaacaggccccatgctgacgtccctcctcaagagctggatggcattgcaaatgatgacagcacttctggtggatgaatttgggggcacaaacagcttttttcctcttttggctcagtatttaaaagtggaccaacttgctcttaatcacagggcaagaaggttgaccgggccatcttggttttcttctggatgagctctttggttttcagaagactgtgacaagttctggcccaggattcgctcactgaccctcaattgtcctctttggcatgcgtttcttactgttctccatgtgtcggcatgtctctacctctaagccagtgtttttcaactatgtttatccagactccttctccacaatgatgaatccacagttggttatctgctactgcccattagctaaaatcattttgctgcttgactttatggagtttgtattatgaaatcagtggtattttgaatgtgttctttctaactacatgcatctctccactcaactccaccccatcccatcccaccttgaaaatcgctgctctgaaccagtgttctccaccttgtcctccacacatctcataggaaatgttcaacaattctgtgaaaggtcacaggacccaattggagaaatcatatgaaaagcatagttggtcttggtgtcatatggatcagaggcacaagtgcagaggctgtggtcatgcggaacactctgttatttaagatggctatccagataatcctgaacactgtgtatttattttatttagactaccagcaaagattaaagcatgaaatgtaaaacatctgataaaacttacagccccctacaccaagagtgtatctgtgaaagagctcctacactttgaaaacttaagaatcccttatcatgaagtttgcctgttctagaattgtaagattgttaatttccttcaatctctagtgacaacacttaatttcttttctaataaaaaaaacctatagatgattcagtg

SEQ ID NO: 57482 - DNA, 8972 bp, Homo Sapiens
cagctgccacttttcaccgttagaagtagagctttttccagacctcctaccttttagtctactttgaaaggtgaaagaaagaacatcgtttcaggaataaaaatgcacagtagtagttatagttaccgtagcagtgattctgtgtttagtaacactaccagcactcgaaccagtcttgattcaaatgaaaatcttctcttggttcattgtggtccaacactgatcaactcttgcattagcttcggcagtgaatcctttgatggacacaggttagaaatgttgcaacagattgccaacagagttcagagggacagtgtcatctgtgaagacaaactgattcttgctggaaatgctcttcagtctgattctaaaagattagaatcaggagtgcagtttcagaatgaagcagaaattgctgggtatatacttgaatgtgagaaccttttacgccagcatgtaattgatgtacagattcttattgatggaaaatactaccaggcagatcaattggtacagagggttgcaaaactgcgtgacgaaattatggccttaaggaacgaatgttcttctgtgtacagcaaaggacgcatactgacaacagaacagacaaagctcatgatatcaggaatcactcaaagtttaaactcaggatttgcacagaccttacaccctagtctgacctcagggctgacccagagtttaacaccttccctaacctcttctagtatgacttctggcctgtcatcagggatgacttcccgcctgactccatctgtcactccagcttatacacctggtttcccatcaggattagttccaaatttcagttcaggagtagagccaaattcattgcaaactttgaagttgatgcagatccgaaaaccccttctaaagtcttctttgctggatcaaaatttaacagaagaagaaatcaatatgaaatttgttcaggatcttttgaattgggttgatgagatgcaggtacaactggaccgcactgagtggggctcagatttgccaagtgttgaaagccatttagaaaatcataaaaatgttcatagagctattgaagaatttgaatctagtctcaaagaagctaaaatcagtgagattcaaatgacagcacctcttaaactgacttatgcagaaaagttgcacagattagagagtcagtatgcaaaactcttgaatacatccaggaatcaagaacggcaccttgatacactccataattttgtaagtcgtgcgactaatgaacttatttggttgaatgaaaaagaagaggaggaagttgcttatgactggagtgagagaaacaccaacatagctaggaaaaaagattatcatgctgaattaatgagagaacttgatcaaaaggaagaaaatattaaatcagttcaggagatagcagagcagctacttctagaaaatcatccagcccggttaactattgaggcctacagagcggcaatgcagacgcagtggagctggatcttacagctctgccagtgtgtggagcagcacataaaggagaacacagcgtatttcgagtttttcaatgatgccaaagaagctactgattacttaaggaatctaaaagatgccattcagcggaagtacagctgtgatagatcaagcagcattcacaagctagaagaccttgttcaggaatcaatggaagagaaagaagaacttctgcagtacaaaagcactatagcaaacctaatgggaaaagcaaaaacaataattcaactgaagccaaggaattctgactgtccactcaaaacttctattccgatcaaagctatctgtgactacagacaaattgagataaccatttacaaagacgatgaatgtgttttggcgaataactctcatcgtgctaaatggaaggtcattagtcctactgggaatgaggctatggtcccatctgtgtgcttcaccgttcctccaccaaacaaagaagcggtggaccttgccaacagaattgagcaacagtatcagaatgtcctgactctttggcatgagtctcacataaacatgaagagtgtagtatcctggcattatctcatcaatgaaattgatagaattcgagctagcaatgtggcttcaataaagacaatgctacctggtgaacatcagcaagttctaagtaatctacaatctcgttttgaagattttctggaagatagccaggaatcccaagtcttttcaggctcagatataacacaactggaaaaggaggttaatgtatgtaagcagtattatcaagaacttcttaaatctgcagaaagagaggagcaagaggaatcagtttataatctctacatctctgaagttcgaaacattagacttcggttagagaactgtgaagatcggctgattagacagattcgaactcccctggaaagagatgatttgcatgaaagtgtgttcagaatcacagaacaggagaaactaaagaaagagctggaacgacttaaagatgatttgggaacaatcacaaataagtgtgaggagtttttcagtcaagcagcagcctcttcatcagtccctaccctacgatcagagcttaatgtggtccttcagaacatgaaccaagtctattctatgtcttccacttacatagataagttgaaaactgttaacttggtgttaaaaaacactcaagctgcagaagccctcgtaaaactctatgaaactaaactgtgtgaagaagaagcagttatagctgacaagaataatattgagaatctaataagtactttaaagcaatggagatctgaagtagatgaaaagagacaggtattccatgccttagaggatgagttgcagaaagctaaagccatcagtgatgaaatgtttaaaacgtataaagaacgggaccttgattttgactggcacaaagaaaaagcagatcaattagttgaaaggtggcaaaatgttcatgtgcagattgacaacaggttacgggacttagagggcattggcaaatcactgaagtactacagagacacttaccatcctttagatgattggatccagcaggttgaaactactcagagaaagattcaggaaaatcagcctgaaaatagtaaaaccctagccacacagttgaatcaacagaagatgctggtgtccgaaatagaaatgaaacagagcaaaatggacgagtgtcaaaaatatgcagaacagtactcagctacagtgaaggactatgaattacaaacaatgacctaccgggccatggtagattcacaacaaaaatctccagtgaaacgccgaagaatgcagagttcagcagatctcattattcaagagttcatggacctaaggactcgatatactgccctggtcactctcatgacacaatatattaaatttgctggtgattcattgaagaggctggaagaggaggagattaaaaggtgtaaggagacttctgaacatggggcatattcagatctgcttcagcgtcagaaggcaacagtgcttgagaatagcaaacttacaggaaagataagtgagttggaaagaatggtagctgaactaaagaaacaaaagtcccgagtagaggaagaacttccgaaggtcagggaggctgcagaaaatgaattgagaaagcagcagagaaatgtagaagatatctctctgcagaagataagggctgaaagtgaagccaagcagtaccgcagggaacttgaaaccattgtgagagagaaggaagccgctgaaagagaactggagcgggtgaggcagctcaccatagaggccgaggctaaaagagctgccgtggaagagaacctcctgaattttcgcaatcagttggaggaaaacacctttaccagacgaacactggaagatcatcttaaaagaaaagatttaagtctcaatgatttggagcaacaaaaaaataaattaatggaagaattaagaagaaagagagacaatgaggaagaactcttgaagctgataaagcagatggaaaaagaccttgcatttcagaaacaggtagcagagaaacagttgaaagaaaagcagaaaattgaattggaagcaagaagaaaaataactgaaattcagtatacatgtagagaaaatgcattgccagtgtgtccgatcacacaggctacatcatgcagggcagtaacgggtctccagcaagaacatgacaagcagaaagcagaagaactcaaacagcaggtagatgaactaacagctgccaatagaaaggctgaacaagacatgagagagctgacatatgaacttaatgccctccagcttgaaaaaacgtcatctgaggaaaaggctcgtttgctaaaagataaactagatgaaacaaataatacactcagatgccttaagttggagctggaaaggaaggatcaggcggagaaagggtattctcaacaactcagagagcttggtaggcaattgaatcaaaccacaggtaaagctgaagaagccatgcaagaagctagtgatctcaagaaaataaagcgcaattatcagttagaattagaatctcttaatcatgaaaaagggaaactacaaagagaagtagacagaatcacaagggcacatgctgtagctgagaagaatattcagcatttaaattcacaaattcattcttttcgagatgagaaagaattagaaagactacaaatctgccagagaaaatcagatcatctaaaagaacaatttgagaaaagccatgagcagttgcttcaaaatatcaaagctgaaaaagaaaataatgataaaatccaaaggctcaatgaagaattggagaaaagtaatgagtgtgcagagatgctaaaacaaaaagtagaggagcttactaggcagaataatgaaaccaaattaatgatgcagagaattcaggcagaatcagagaatatagttttagagaaacaaactatccagcaaagatgtgaagcactgaaaattcaggcagatggttttaaagatcagctacgcagcacaaatgaacacttgcataaacagacaaaaacagagcaggattttcaaagaaaaattaaatgcctagaagaagacctggcgaaaagtcaaaatttggtaagtgaatttaagcaaaagtgtgaccaacagaacattatcatccagaataccaagaaagaagttagaaatctgaatgcggaactgaatgcttccaaagaagagaagcgacgcggggagcagaaagttcagctacaacaagctcaggtgcaagagttaaataacaggttgaaaaaagtacaagacgaattacacttaaagaccatagaggagcagatgacccacagaaagatggttctgtttcaggaagaatctggtaaattcaaacaatcagcagaggagtttcggaagaagatggaaaaattaatggagtccaaagtcatcactgaaaatgatatttcaggcattaggcttgactttgtgtctcttcaacaagaaaactctagagcccaagaaaatgctaagctttgtgaaacaaacattaaagaacttgaaagacagcttcaacagtatcgtgaacaaatgcagcaagggcagcacatggaagcaaatcattaccaaaaatgtcagaaacttgaggatgagctgatagcccagaagcgtgaggttgaaaacctgaagcaaaaaatggaccaacagatcaaagagcatgaacatcaattagttttgctccagtgtgaaattcaaaaaaagagcacagccaaagactgtaccttcaaaccagattttgagatgacagtgaaggagtgccagcactctggagagctgtcctctagaaacactggacaccttcacccaacacccagatcccctctgttgagatggactcaagaaccacagccattggaagagaagtggcagcatcgggttgttgaacagatacccaaagaagtccaattccagccaccaggggctccactcgagaaagagaaaagccagcagtgttactctgagtacttttctcagacaagcaccgagttacagataacttttgatgagacaaaccccattacaagactgtctgaaattgagaagataagagaccaagccctgaacaattctagaccacctgttaggtatcaagataacgcatgtgaaatggaactggtgaaggttttgacacccttagagatagctaagaacaagcagtatgatatgcatacagaagtcacaacattaaaacaagaaaagaacccagttcccagtgctgaagaatggatgcttgaagggtgcagagcatctggtggactcaagaaaggggatttccttaagaagggcttagaaccagagaccttccagaactttgatggtgatcatgcatgttcagtcagggatgatgaatttaaattccaagggcttaggcacactgtgactgccaggcagttggtggaagctaagcttctggacatgagaacaattgagcagctgcgactcggtcttaagactgttgaagaagttcagaaaactcttaacaagtttctgacgaaagccacctcaattgcagggctttacctagaatctacaaaagaaaagatttcatttgcctcagcggccgagagaatcataatagacaaaatggtggctttggcatttttagaagctcaggctgcaacaggttttataattgatcccatttcaggtcagacatattctgttgaagatgcagttcttaaaggagttgttgaccccgaattcagaattaggcttcttgaggcagagaaggcagctgtgggatattcttattcttctaagacattgtcagtgtttcaagctatggaaaatagaatgcttgacagacaaaaaggtaaacatatcttggaagcccagattgccagtgggggtgtcattgaccctgtgagaggcattcgtgttcctccagaaattgctctgcagcaggggttgttgaataatgccatcttacagtttttacatgagccatccagcaacacaagagttttccctaatcccaataacaagcaagctctgtattactcagaattactgcgaatgtgtgtatttgatgtagagtcccaatgctttctgtttccatttggggagaggaacatttccaatctcaatgtcaagaaaacacatagaatttctgtagtagatactaaaacaggatcagaattgaccgtgtatgaggctttccagagaaacctgattgagaaaagtatatatcttgaactttcagggcagcaatatcagtggaaggaagctatgttttttgaatcctatgggcattcttctcatatgctgactgatactaaaacaggattacacttcaatattaatgaggctatagagcagggaacaattgacaaagccttggtcaaaaagtatcaggaaggcctcatcacacttacagaacttgctgattctttgctgagccggttagtccccaagaaagatttgcacagtcctgttgcagggtattggctgactgctagtggggaaaggatctctgtactaaaagcctcccgtagaaatttggttgatcggattactgccctccgatgccttgaagcccaagtcagtacagggggcataattgatcctcttactggcaaaaagtaccgggtggccgaagctttgcatagaggcctggttgatgaggggtttgcccagcagctgcgacagtgtgaattagtaatcacagggattggccatcccatcactaacaaaatgatgtcagtggtggaagctgtgaatgcaaatattataaataaggaaatgggaatccgatgtttggaatttcagtacttgacaggagggttgatagagccacaggttcactctcggttatcaatagaagaggctctccaagtaggtattatagatgtcctcattgccacaaaactcaaagatcaaaagtcatatgtcagaaatataatatgccctcagacaaaaagaaagttgacatataaagaagccttagaaaaagctgattttgatttccacacaggacttaaactgttagaagtatctgagcccctgatgacaggaatttctagcctctactattcttcctaatgggacatgtttaaataactgtgcaaggggtgatgcaggctggttcatgccactttttcagagtatgatgatatcggctacatatgcagtctgtgaattatgtaacatactctatttcttgagggctgcaaattgctaagtgctcaaaatagagtaagttttaaattgaaaattacataagatttaatgcccttcaaatggtttcatttagccttgagaatggttttttgaaacttggccacactaaaatgtttttttttttacgtagaatgtgggataaacttgatgaactccaagttcacagtgtcatttcttcagaactccccttcattgaatagtgatcatttattaaatgataaattgcactcgctgaaagagcacgtcatgaagcaccatggaatcaaagagaaagatataaattcgttcccacagccttcaagctgcagtgttttagattgcttcaaaaaatgaaaaagttttgcctttttctgtatatagtgaccttctttgcatattaaaatgtttaccacaatgtcccatttctagttaagtcttcgcacttgaaagctaacattatgaatattatgtgttggaggaggggaaggattttcttcattctgtgtattttccttacatgtacagtagacgttctctattctatcagccttctatggtacctttttgtcaggacaattaggattgtaatgctaatgcaaaggcagcaattcaaagatcttctagtgcctcatgaataaagttgagatttaaaatttgtaacattgatggaacagctgggaggttagaccaatcattaaggaatgtatgccatagctttctttgctaccataaacattttggaggtgcatctgctatgtgacatggtaaatatggttaagtgaatgaataaaatgttttagtaa

SEQ ID NO: 57483 - DNA, 2840 bp, Homo Sapiens
gtttttgtgcaggaacagcccctcccgtctttgtcctggcggtgagcacccagggctaagcttttgaacactttctttgtgtttggattcagcccaggcaatgcatatttgctttcatttcttcttgagcttgaggagctcctgggtgcaaatcttggaaaatgaggatctctgagcctttccaggccagctctttgttttgtagcagacaattgaggctttgaaaaggaaagtgggtgggggcaccccacaggtggccctcatcacccaattgccagtgcctgcaggctgcttcagcagaggcccagagtcaaagaggacttaaaaccagctgtcgtttctcccttagcttctgtgtatgagagaaacgacttctgtttttcaaagtaagaacaaggaggaatttgtttctaaaagaacattaaaacacaggctcgtggtctaaaagcaaatggttcagcaggatgttcagggccttaaagcacagtcagcaggactcagcatctcccagcacctgctctccggttgtcatggtaacatcatccccaacccaaccaccttgtccagccgagagacagcaatcataaggagggacctcggtttcccccgaggatcctgggcttcctttctgaaacgcttgcttctgagctcagcaaccaggaacaccaggccagcccatccccagcacctctgtggagatgagggacaaagtcctacagtccctcttcctgttctgatgagaaagggagggaagaaaacataccccgagcgcctgcaatatggtcatgacactttcaaaaagcctgtgctatggagtcatgatcagaaaccagagtgtggagagggtcagcagcctgcctcagagcagccagctaggcggggagtggtaaatttgggacttgtacccaggcatgactggctccgagcccagtgctccactctatggaatgttccctgggcctcagttgctttcctttcctttgcaggccgcgggctgctgccactctggcagctggtgagttagctggagggcaacattccaaagcaggggcagcatgctgctttcctcctgtgcccactcctgcggggaagtccgttgactcccaccgctgaagggagctggcaacaccaggatgaggtcccaggggacgggagcaggtacccactgtctgtctaccttcccactggaaaagcacggacaggccagcccttgcgggggcaggcagaggacagagttggctttgcgcggtctctgcctgctgagcagttccaattcctctcatgggagaaacaaggaggcagtcgcttgtgcatgttccagaagttttactggggaggaggaagcggacagaggaagctgtgtgtgcatgtgaaggggtgggcagggtgggagggatgcacgcgtatgtgagcatagcatgtgtgagtactacacacatctccatgcagaagcacaactgggcagccctggcttccagctctgggcttcagcacaacagacaccagcctgtggtctctcagaagccagggagaccacatcgggctcaggacgttttacccaaagtccagagtttttatgcctctccctggcattctccataaagaagggaaggtcagatgaccccttagatctgtgtcatctgggaatttccttgggctggtttagacacgatgccctctttttctcaggatagcagataacctgctttgaaagagggcttaattctgtgggtcctaaattttctcctttctctctctctttctgtgtgtgtgtgttgggaaaatggcaagtttccaataccagctttggaggaacgattacgttttccctccaatttcaagtccgaaagaccagagccctcattccaaagccccccacccagatggattttttcgtttcatttgtcatccgtcccatgggagggccccatgtctcctcagaacccatcctggaggcagcaggtcgggtagagtgagtttggcctgctcatgacctccacccctgagattgtgaacaaggatgtctggggcgatgctgagaatgtttttgaagctgctcccagatgacgctgatgatcacaccagattgagtgctgcgatcgccttgagtccagcctctgcataaacgaggttctcataaacaagttcactctaccctaagctaagtctatgtgagcaaacccacttcatcctttgtacctggagacctggttacactaacctgatactgacctgttcatgtagctggaatggtgtgtttcatgcagtgtggaccaagcaatggcatggggtgtgtgtgtgtgtgtgtgtgtgtctgtgtgtgtgtgtttgtgtatgcgttcacacttgtgtgtgtatatgtgcatgtagatgctgcataaatgatttttgatgtcaaagacaaacacattccattgttttaaatattctattatgtaaacaatacgcagagggaccatatctactcttgtcatattatttgtgatggtaaaacatgcatttgcaataaattaagctttctgggaaggcaagcagtattggagccaaacgactgtctcggaacatgtgtgtgttatctcggttcatatcaagtccaaagctaatggagccttccccgccatccagggaggaacaccaggaccccggagtttcttcttagtgctatattttaaagttgcattgacgttttcctccccttccttttgtgcaagttggaagtagcagtgttctaaaagatggtttgacgtttttgctgttgttttatgtttttaaaaatgtatctgctttgtgtttggaaataaaaatctctattttggtctatgaaaaaaaaaaaaaaaaaa

SEQ ID NO: 57484 - DNA, 1496 bp, Homo Sapiens
cgcactccctgctgggtgagcagcactgtaaagatgaagctggctaactggtactggctgagctcagctgttcttgccacttacggttttttggttgtggcaaacaatgaaacagaggaaattaaagatgaaagagcaaaggatgtctgcccagtgagactagaaagcagagggaaatgcgaagaggcaggggagtgcccctaccaggtaagcctgccccccttgactattcagctcccgaagcaattcagcaggatcgaggaggtgttcaaagaagtccaaaacctcaaggaaatcgtaaatagtctaaagaaatcttgccaagactgcaagctgcaggctgatgacaacggagacccaggcagaaacggactgttgttacccagtacaggagccccgggagaggttggtgataacagagttagagaattagagagtgaggttaacaagctgtcctctgagctaaagaatgccaaagaggagatcaatgtacttcatggtcgcctggagaagctgaatcttgtaaatatgaacaacatagaaaattatgttgacagcaaagtggcaaatctaacatttgttgtcaatagtttggatggcaaatgttcaaagtgtcccagccaagaacaaatacagtcacgtccagttcaacatctaatatataaagattgctctgactactacgcaataggcaaaagaagcagtgagacctacagagttacacctgatcccaaaaatagtagctttgaagtttactgtgacatggagaccatggggggaggctggacagtgctgcaggcacgtctcgatgggagcaccaacttcaccagaacatggcaagactacaaagcaggctttggaaacctcagaagggaattttggctggggaacgataaaattcatcttctgaccaagagtaaggaaatgattctgagaatagatcttgaagactttaatggtgtcgaactatatgccttgtatgatcagttttatgtggctaatgagtttctcaaatatcgtttacacgttggtaactataatggcacagctggagatgcattacgtttcaacaaacattacaaccacgatctgaagtttttcaccactccagataaagacaatgatcgatatccttctgggaactgtgggctgtactacagttcaggctggtggtttgatgcatgtctttctgcaaacttaaatggcaaatattatcaccaaaaatacagaggtgtccgtaatgggattttctggggtacctggcctggtgtaagtgaggcacaccctggtggctacaagtcctccttcaaagaggctaagatgatgatcagacccaagcactttaagccataaatcactctgttcattcctccaggtattcgttatctaatagggcaattaattccttcagcactttagaatatgccttgtttcatatttttcatagctaaaaaatgtttgacatcctttgagatattttattactaaaatctgcc

SEQ ID NO: 57485 - DNA, 3745 bp, Homo Sapiens; identical to SEQ ID NO: 29558

SEQ ID NO: 57486 - DNA, 6127 bp, Homo Sapiens
agagagaggagagggagaaggagagaggggcagaggggaagggagagagggagagcacgcgagacggaaaggagcgcctcagagtctctgaagcacgcaagagataaccgattaggaatttttcgggcaactgtcacccggatagctgtcagagaatcatcatcaccgcaactctgacgtttcctacaagaagttagagacttaagcagtattggcatcggatggaaatggtatgcatgctgctgtggaaaatatccctgagctgaagaagtgcaactatgtgttgtgtgtgctaaatgcccagaagaacccagacccagtgggtaagagagacgaaatgtggagagaatgactaacgacaaatccgtgaatttgttctctggagttgctaatttgccagcccgaagcaacacattttacaaggaggaaacattttgctgcttctgatttctccccaaactggtgctaccagatgcatggctttctatgtgttggaacaaatcattcctaactgcagcatactgggaaaggggaaaggttgaggcaactaaccggctgtctccaaataagtgatgagatataatgcatcctccagtccatgcacgcttcctcttgcaatttgtgcatcattcctcagtggaaacctttaaaccctaaaatccaggaaaagaaaataaatacattatcatggacctgagggatttttacctgttggctgctctgattgcctgtttaaggctggattccgcaatagctcaagaacttatttacactattagagaggaattgcctgaaaatgtgcccataggaaacataccaaaggatctgaacatttctcacatcaatgctgccacagggaccagcgccagccttgtctacagactggtttctaaagctggggatgcccctttggtgaaagtatccagcagcactggggaaattttcacaacctccaacagaatagacagagaaaaactctgtgctggcgcctcatatgctgaggagaatgagtgtttctttgaacttgaggtggtgatcctccccaatgatttcttcaggctgatcaaaataaaaataattgtcaaggataccaatgataatgcccccatgtttccatctcctgtcatcaatatttccattccagaaaacactttgatcaacagccgctttccaattccatcagcaacagatcctgacacaggcttcaatggtgtacagcattatgaattgttaaatgggcagagtgtttttggactggatatcgtggaaactccagagggagagaagtggccacaactgattgttcagcaaaacttggatagagaacagaaagatacctatgtgatgaaaatcaaagtagaggatggaggcactccacagaaatccagtacggccatactgcaggtcacagtaagtgatgtaaatgacaacaggccagtgtttaaagagggtcaagtggaggtgcatattccagagaatgctcccgtaggtacctctgtaattcagctccatgccactgatgcagatataggcagtaatgctgaaatccggtacatttttggtgcccaggtcgcccctgcaaccaaaagactctttgctttaaataatactactgggctgattacagttcagaggtccttagatagagaggagacagccattcacaaagtgacagtgctggctagtgacggcagctccactcctgctcgagcaacggttaccatcaatgtcaccgatgtaaatgataaccctcctaatatagacctcaggtacattataagtcccatcaatggcaccgtgtatttatctgagaaagatcctgtcaatacaaagattgccctaattacagtttcagataaggacacagatgtgaatggcaaagtgatctgttttattgaaagagaggtcccatttcatttgaaggcggtatatgacaaccaatatttgttagagacctcttctttgttggactatgagggcaccaaagaattcagctttaaaattgttgcctctgattctgggaagcccagtttaaatcagactgccctggtaagggttaagcttgaggatgaaaatgacaacccaccaattttcaaccagcctgtaattgagctgtcagtttctgaaaacaaccgacgtgggttatacttaacaactattagtgccacagatgaagacagtgggaaaaatgcagacattgtttatcagcttggaccgaatgcctccttctttgatctggaccgaaaaacaggagttttgacagcctccagagtatttgacagagaagaacaagaacgattcatttttacagtaactgccagggacaatgggacccctcccctccaaagccaagcggctgtgattgttactgttctggatgagaatgacaatagccccaagtttactcataatcattttcaattttttgtgtctgagaatctgccaaagtatagtactgtgggggtaatcacagtgacagatgcagatgctggagagaataaagctgtgactctttccattctaaatgacaatgataattttgtgttggatccctattctggagtcataaagtcaaatgtctcatttgatagagagcagcagagttcctacacttttgatgtcaaagccactgatggaggacaaccacctcgttcctctactgcaaaagtaactatcaacgtcatggatgtcaatgacaacagcccagttgtcatttctccaccgtctaatacttcctttaagttggtgcccctctcagccattcctggctccgtggtagcagaagtttttgcagtggatgttgacactggaatgaacgctgaactaaagtatactatagtgagtggaaacaataaaggcttattccggattgatccagtaacaggtaacattactctggaagaaaaaccagcacctactgatgtgggattgcatcgtttggtggtcaacataagtgacctggggtaccctaagtctttgcacacgcttgtgcttgtattcctttatgttaacgacactgctggaaatgcctcctatatctatgacttgatccgcaggactatggagaccccgttggacaggaacataggggatagtagccaaccctatcaaaatgaggactatctaaccatcatgattgccatcatcgccggtgccatggtggtcattgttgtgatcttcgtcaccgttctggtgcgctgtcgccatgcatcaaggttcaaagcagctcagaggagcaagcaaggtgccgaatggatgtccccaaaccaggagaacaagcaaaacaagaaaaagaaaagaaagaaaaggaagtctcccaaaagctctcttttgaactttgttactatcgaagagtccaaacccgatgatgcagttcatgaacctatcaatgggacaataagcctgccggctgaactggaggagcaaagtataggaagatttgactggggcccggcacctccaacaacattcaagcctaacagtcctgacctggccaagcactacaaatctgcttctccacagcctgcttttcatctcaaaccagacactccagtttccgtgaaaaagcaccacgtgattcaggaactccctttggacaacacctttgttgggggttgtgacaccctttctaaacgctcttccactagttcagatcacttcagtgcctcagagtgcagttcccaaggaggcttcaagacaaagggccccttacacaccagacagtcgcagcgccgtgttacgtttcatctccctgatggctcccaggaaagctgcagtgacagtggtctaggagaccatgagccggtgggtagtggaaccctgatctcacaccctcttcctctggttcagccacaggacgaattctatgaccaggcctctccggacaagaggactgaagcagatggcaactctgatcccaactctgatgggcctttgggtccccgaggattagctgaagctacagagatgtgcactcaagagtgcttggttttgggtcactctgataattgctggatgcctcctggcttgggtccatatcaacaccccaaatctcctctctcaacctttgcaccccagaaagaatgggtgaagaaggacaagcttgtgaatgggcacaccctgaccagagcctggaaagaagacagcaacaggaaccagttcaatgaccgtaagcagtatggctccaatgaaggccatttcaacaatggcagccacatgacagacattcctctggcaaatctgaagtcttataagcaagcaggaggtgctactgagagtcctaaggagcaccaactctaagaaaaggctatatgggacctaataactttaaatagacatgctaataccgtgtgcgtcagagctttatgtattcaatagatctctacaactatgccccttctagcagggatacctataactttgtgttagcaccatggagaatacaatgtttttgcaacatatgagagaagatagttctagccatgcaattttgtttactagaattgattacactctccagagatctctccattgtgcaaattttttttattattgcattttattttgaccctggactgctgctatgaacaatagaatatgcatttggaaagtaagaaagtttcatggattagagtgactgaaaaacatatccagttagaaaattgtgcttttttttttttttttttttttttttgtcattgatttgtgctgggactgctatacttgacattatactgcaaacaaaacttaaagagataagcattaaacctattgtgctgttaacaacgttagtggacacttgtaagtcaatcagtgttaaagtatttgtaaatagaagcaagctattattaacaacttttgtgtacttataatgttcacctaaaaatgttgtagcataattctgtgttttatggttgcttctgtccttctttttatttacctctttgttgttatttttgttgtttctttcagtgaggtgtttctgtgttagtagtctgtcttgacacacattgttcaaacaatctcaagcacttgtgtttaaaaaaggttctgaaatcttgcttctcatatgatagcttatgatgccggaattctgtaaacaataaagatgaaagaaaaaatgaaaactttatacaaaaaaggacttctgcaaaagcttggaaattcagaacctattttttatcatcttattttcaaagtaggcaaaagcaaaatcacttaattagtaccattaagtgagagagtaatggaaaactgttatccatcaaaagtgatataatatcctgtacttgtcactcatgtaaaactaatgtatcaaaattagcatatatggaagaaaaatcactattcaaaaatagtttcaattgggcaaatgtgtgtctacaactttgttgaaatggcagagtctgtgttgatcctcatatacaataatgttgttgtaacacaagtgttattagaccatagccacaaaatatttaatgtgttgtgccttcatgatgtaacagaacattctccaggtagggtagttgggggaaataaagggataaatctctaattattgctgtttaactgtttgttatcatagttggtcaatgcctggcaggtaccagcatattgtcacttaggtcaaaccaataaagtgacaactaatgttaataagatctcagttgcacgtgcaaacaaatccaaattcgaacattcttaggaggtttttgttaaggcatgacagatgatttaaacaaataaatagcatgcaacaaaatgtctttattgaaagaagtggaagttatcttaatgccacggttcaccatcaatttaaaagtaaaaaaaacaaaaaaaaaacaaaaaatttaaaaaaaaggtttgctaatctgatagttaatttgttcttaccaaaaaataaaattactttgtaaatagcagttcacatttttccacagtataatggaaaataatgggtaggggtgcattgcttattgaagtacatttttgtcggtttgtgaggggtgtttgatgactttgacagaataaatatctaaacaattatccttgttactgctttgccagttctacgttatttacaattattcagctcttgcaataaatgttctgaattcctgaaaaaaaa

SEQ ID NO: 57487 - DNA, 2564 bp, Homo Sapiens
tcgccgggtgtcccagtgtcaccaacactcggccgccgccgccagcttggcgcgcaccgccgcctccgccaccgccgacagcgcgcatcctccgtgtccccgctccgccgcccgagcaggtgccactatgcacgtgaagaagtacctgctgaagggcctgcatcggctgcagaagggccccggctacacgtacaaggagctgctggtgtggtactgcgacaacaccaacacccacggccccaagcgcatcatctgtgaggggcccaagaagaaagccatgtggttcctgctcaccctgctcttcgccgccctcgtctgctggcagtggggcatcttcatcaggacctacttgagctgggaggtcagcgtctccctctccgtaggcttcaagaccatggacttccccgccgtcaccatctgcaatgctagccccttcaagtattccaaaatcaagcatttgctgaaggacctggatgagctgatggaagctgtcctggagagaatcctggctcctgagctaagccatgccaatgccaccaggaacctgaacttctccatctggaaccacacacccctggtccttattgatgaacggaacccccaccaccccatggtccttgatctctttggagacaaccacaatggcttaacaagcagctcagcatcagaaaagatctgtaatgcccacgggtgcaaaatggccatgagactatgtagcctcaacaggacccagtgtaccttccggaacttcaccagtgctacccaggcattgacagagtggtacatcctgcaggccaccaacatctttgcacaggtgccacagcaggagctagtagagatgagctaccccggcgagcagatgatcctggcctgcctattcggagctgagccctgcaactaccggaacttcacgtccatcttctaccctcactatggcaactgttacatcttcaactggggcatgacagagaaggcacttccttcggccaaccctggaactgaattcggcctgaagttgatcctggacataggccaggaagactacgtccccttccttgcgtccacgggcggggtcaggctgatgcttcacgagcagaggtcataccccttcatcagagatgagggcatctacgccatgtcggggacagagacgtccatcggggtactcgtggataagcttcagcgcatgggggagccctacagcccgtgcaccgtgaatggttctgaggtccccgtccaaaacttctacagtgactacaacacgacctactccatccaggcctgtcttcgctcctgcttccaagaccacatgatccgtaactgcaactgtggccactacctgtacccactgccccgtggggagaaatactgcaacaaccgggacttcccagactgggcccattgctactcagatctacagatgagcgtggcgcagagagagacctgcattggcatgtgcaaggagtcctgcaatgacacccagtacaagatgaccatctccatggctgactggccttctgaggcctccgaggactggattttccacgtcttgtctcaggagcgggaccaaagcaccaatatcaccctgagcaggaagggaattgtcaagctcaacatctacttccaagaatttaactatcgcaccattgaagaatcagcagccaataacatcgtctggctgctctcgaatctgggtggccagtttggcttctggatggggggctctgtgctgtgcctcatcgagtttggggagatcatcatcgactttgtgtggatcaccatcatcaagctggtggccttggccaagagcctacggcagcggcgagcccaagccagctacgctggcccaccgcccaccgtggccgagctggtggaggcccacaccaactttggcttccagcctgacacggccccccgcagccccaacactgggccctaccccagtgagcaggccctgcccatcccaggcaccccgccccccaactatgactccctgcgtctgcagccgctggacgtcatcgagtctgacagtgagggtgatgccatctaaccctgcccctgtccaccccgggtgggtgaaactcactgagcagccaagactgttgcccgaggactcactgtatggtgccctctccaaagggtcgggagggtagctctccaggccagagcttgtgtccttcaacagagaggccagcggcaactggtccgttactggccaagggctctgaagaatcaacggtgctggtacaggatacaggaataaattgtatcttcacctggttcctaccctcgtccctacctgtcctgatcctggtcctgaagacccctcggaacaccctctcctggtggcaggccacttccctcccagtgccagtctccatccaccccagagaggaacaggcgggtgggccatgtggttttctccttcctggccttggctggcctctggggcaggggtggtggagagatggaagggcatcaggtgtagggaccctgccaagtggcacctgatttactctagaaaataaaagtagaaaatactgagaaaaaaaaaaaaaaaaaaa

SEQ ID NO: 57488 - DNA, 2204 bp, Homo Sapiens
accccgcgcggttccacgcccctggccgcggcccgggcgctgcgctgctcgacgcggcgggcggcgggcggggaccgggggcgggggcggcggcggcggccgggagagcggaggaggcggagcagggagccgggagcgggctggcccgcgctcctcctgctggctggggattttccagcctgggcgctgacgccgcggacctccctgcgaccgtcgcggaccatgggcgacaaagggacccgagtgttcaagaaggccagtccaaatggaaagctcaccgtctacctgggaaagcgggactttgtggaccacatcgacctcgtggaccctgtggatggtgtggtcctggtggatcctgagtatctcaaagagcggagagtctatgtgacgctgacctgcgccttccgctatggccgggaggacctggatgtcctgggcctgacctttcgcaaggacctgtttgtggccaacgtacagtcgttcccaccggcccccgaggacaagaagcccctgacgcggctgcaggaacgcctcatcaagaagctgggcgagcacgcttaccctttcacctttgagatccctccaaaccttccatgttctgtgacactgcagccggggcccgaagacacggggaaggcttgcggtgtggactatgaagtcaaagccttctgcgcggagaatttggaggagaagatccacaagcggaattctgtgcgtctggtcatccggaaggttcagtatgccccagagaggcctggcccccagcccacagccgagaccaccaggcagttcctcatgtcggacaagcccttgcacctagaagcctctctggataaggagatctattaccatggagaacccatcagcgtcaacgtccacgtcaccaacaacaccaacaagacggtgaagaagatcaagatctcagtgcgccagtatgcagacatctgccttttcaacacagctcagtacaagtgccctgttgccatggaagaggctgatgacactgtggcacccagctcgacgttctgcaaggtctacacactgacccccttcctagccaataaccgagagaagcggggcctcgccttggacgggaagctcaagcacgaagacacgaacttggcctctagcaccctgttgagggaaggtgccaaccgtgagatcctggggatcattgtttcctacaaagtgaaagtgaagctggtggtgtctcggggcggcctgttgggagatcttgcatccagcgacgtggccgtggaactgcccttcaccctaatgcaccccaagcccaaagaggaacccccgcatcgggaagttccagagaacgagacgccagtagataccaatctcatagaacttgacacaaatgatgacgacattgtatttgaggactttgctcgccagagactgaaaggcatgaaggatgacaaggaggaagaggaggatggtaccggctctccacagctcaacaacagatagacgggccggccctgcctccacgtggctccggctccactctcgtgcactcggatgcttactcgtcttcttcctgttctggtttcttttcccctttgttcttccagtttctaccagggggccccgtgggcttccagatcacggtgatgaacctctggcctcaggattggccccacatcaccacgccaacaggaccacagcgcactggctccaccccatctctgccatctccactcccctccttttcatgctgtctcccagaaaagctgccagggctctggccttggaattggacttgagatggggagcagacaggggaggatggggaatgtgggacacggtgtggtgggcatgagggcttggaggggtggggatgagggctcaagacacgagagaagatgtccacggtcccaggtggttaacaaagttctggcagctaaaagatgaccgcgttgaaggccacctccttctggctgggaggggcagaactgtggacagattctcaatgcctttttgaagttctgacccaccaaagaccttctgccttcaccctcctccccacctgatgtccctctgtgtctgatagtgatgttggtgaaagttcgtagaccccaggagtagagaaaagcaactggactgactttcttaccagcagttacctagactgaggcaagctgtgtggactcacccaagtatatttcagtactgtcaggctgtgacatcttagc

SEQ ID NO: 57489 - DNA, 4002 bp, Homo Sapiens; identical to SEQ ID NO: 22527

SEQ ID NO: 57490 - DNA, 2215 bp, Homo Sapiens
atgggatgtactctgagcgcagaggagagagccgccctcgagcggagcaaggcgattgagaaaaacctcaaagaggatggcatcagcgccgccaaagacgtgaaattactcctgctcggggctggagaatcaggaaaaagcaccattgtgaagcagatgaagatcatccatgaagatggcttctccggagaagacgtgaaacagtacaagcctgttgtctacagcaacactatccagtccctggcagccatcgtccgggccatggacactttgggcatcgaatatggtgataaggagagaaaggctgacgccaagatggtgtgtgatgtggtgagtcggatggaagacaccgagcccttctctgcagagctgctttctgccatgatgcggctctggggcgactcaggaatccaagagtgcttcaaccggtcccgggagtatcaactcaacgactctgccaaatactacctggacagcctggatcggattggggccgccgactaccagcccactgagcaggacatcctccgaaccagggtcaaaaccactggcatcgtagaaacccacttcacattcaagaacctccacttcaggctgtttgacgtcggaggccagcgatctgaacgcaagaagtggatccattgcttcgaggacgtcacggccatcattttctgtgtcgcgctcagcggctatgaccaggtgctccacgaagacgaaaccacgaaccgcatgcacgagtctctcatgctcttcgactccatctgtaacaacaagttcttcatcgatacctccatcattctcttcctcaacaagaaagatctctttggcgagaagatcaagaagtcacctttgaccatctgctttcctgaatacacaggccccaatacctatgaagacgcagccgcctacatccaagcacaatttgaaagcaaaaaccgctcacccaacaaagaaatatattgtcacatgacttgtgccacagacacgaataacatccaggtggtgttcgacgccgtcaccgacatcatcattgccaacaacctccggggctgcggcttgtactgacctcttgtcctgtatagcaacctattttgactgcttcacggactctttgctgttgacgttgatctcctggtagcatgaccttttggcctttgtaagacacacagcctttctgtatcaagcccctgtctaacctacgaccccagagtgactgacggctgtgtatttctgtagaatgctgtagaatccggttttagttgagtcttcacatttagaatttgaaaggaaaaacagaacatttctcatgtgctttgtagcttaaaaaaaggaaaactcaccatttcaaccatatttctttttcttgcaaaacaaacatacccatctgcaccgacgcctgccccgtcccacctcgcgcgagcccctggagctcctgctgggggaggcccatctgccgcctggggctccggtgcggtgcatggtccgaggagtgtgctcaggccgggctttccagaaggcacaggccactgcaaaccctgctgctgccggccgcccagacaccacagacgccactggcggccctaagccactcccgccacacgctcactccaggttcgtatagaaaaagcacagctctcactggccagtagctgccaaaaagaacacccatcgtataaggaaatccagccccatagaaaacaatctgcccaccgaccccctttctaaggatagcctttgtaggggttttttggttcctttttttttttttcagtttgtgtttttacttttgtcccgccgagtactatgtattaccagcccccacccacagatcagtttcctagtctttgggaaacgggttgtgttttttttcctttgccgtgttggatttccggtcgcggctgacacctcccttcgtgtgtgcgcccctccccacccctgcctgtgttctgtgccctgtgtccgctctctcatgtggggatgtttgtgctgcagacaaaaagaacaaaaaaaaatttttaaataccacaagatggaaaaaaaaaacaaaaaaatttaaaaagatggaatgtagtgtttacattaaagccgccgttttcatgaccaatcctatgtcatttctactttgactaatacccaaaccctaaacctcttcacggtttcacttttaagacttaatctgtgctgaagaagaccagtcacagccatttcaaataaa

SEQ ID NO: 57491 - DNA, 1359 bp, Homo Sapiens
ggccagggtgccgcagacgcggggacgctggctcgctccctccctccctccctccgacgctgtgagtagagaagctaggccccgagccgggcgggactagggtggtggttgtgttctgccctcgcccgtcgccaacgctgggctgactgaaaacctggccctttgggtcgcgcgtcttcgactttcaccgccatgcggacatggggccgtgggagaaactctgggcgggattacggtgaaaattcttgtttgggcgggccctgcggcttctttcttccggctcgccctcggccccgcccccgccccgcccccgctccagctccagccgggtcctcgctcggccccgcacgcggcccgcggtagacggagggcctgggcacccaccgtctccatcccggccccagcccagtcgagcgtccactagaagggcgctccctgtccggccctaatcctcgctcctcacggaggctctttgtcacagcgaagactgacagcccgcagtcttctggacttcttttatggggctcctggcggtgctattcattcagtcattgattcgtcttgtaaatatggagcgcctgctctgtactcgacccggcactgggtaccggaagaaccagacagctcggtttttgccaccatttataagtctgtgtccttttcttgagtactgaaccgagatacagttttaaatgtgctgtgcggtctctgagcagcgactcacctgtgcagatcaaatgatgccgtttggaaaaatttcccagcagttgtgtggcgtaaagaaactcccatggtcatgtgactccagatacttctggggctggttgaatgcagtgtttaataaggtggattatgatcgcatcagggatgttggccctgacagggcggcatccgagtggttgctgcgctgtggggccatggtgcgctaccatggccaggagaggtggcagaaggactacaaccaccttccaacaggccctctggacaaatacaagattcaggcgatcgacgccaccgactcttgtatcatgagcattggatttgatcacatgggtaactaccctatcgttttgctaatagaaaatgcagatgatttgcagtgaccattttgttgcagttgactcacgattatagtcataggtatgtcctttttgcccatttcattatagtcaagtttgtttcttcctgtgtttgatatttattttcaaattaaattgaggttacagacaccttcctctccttcctcctctcactaagcttgtttctgtatgtctctagtctttggtttattgacttaaaatccagggccttgtttgtcaaactatctttgtcaaacttctgtcattgagaagccctcaa

SEQ ID NO: 57492 - DNA, 3694 bp, Homo Sapiens
tgggggcagcggagggaggggtgggaagcaccatgcagtttgtatcctgggccacactgctaacgctcctggtgcgggacctggccgagatggggagcccagacgccgcggcggccgtgcgcaaggacaggctgcacccgaggcaagtgaaattattagagaccctgagcgaatacgaaatcgtgtctcccatccgagtgaacgctctcggagaaccctttcccacgaacgtccacttcaaaagaacgcgacggagcattaactctgccactgacccctggcctgccttcgcctcctcctcttcctcctctacctcctcccaggcgcattaccgcctctctgccttcggccagcagtttctatttaatctcaccgccaatgccggatttatcgctccactgttcactgtcaccctcctcgggacgcccggggtgaatcagaccaagttttattccgaagaggaagcggaactcaagcactgtttctacaaaggctatgtcaataccaactccgagcacacggccgtcatcagcctctgctcaggaatgctgggcacattccggtctcatgatggggattattttattgaaccactacagtctatggatgaacaagaagatgaagaggaacaaaacaaaccccacatcatttataggcgcagcgccccccagagagagccctcaacaggaaggcatgcatgtgacacctcagaacacaaaaataggcacagtaaagacaagaagaaaaccagagcaagaaaatggggagaaaggattaacctggctggtgacgtagcagcattaaacagcggcttagcaacagaggcattttctgcttatggtaataagacggacaacacaagagaaaagaggacccacagaaggacaaaacgttttttatcctatccacggtttgtagaagtcttggtggtggcagacaacagaatggtttcataccatggagaaaaccttcaacactatattttaactttaatgtcaattgtagcctctatctataaagacccaagtattggaaatttaattaatattgttattgtgaacttaattgtgattcataatgaacaggatgggccttccatatcttttaatgctcagacaacattaaaaaacttttgccagtggcagcattcgaagaacagtccaggtggaatccatcatgatactgctgttctcttaacaagacaggatatctgcagagctcacgacaaatgtgataccttaggcctggctgaactgggaaccatttgtgatccctatagaagctgttctattagtgaagatagtggattgagtacagcttttacgatcgcccatgagctgggccatgtgtttaacatgcctcatgatgacaacaacaaatgtaaagaagaaggagttaagagtccccagcatgtcatggctccaacactgaacttctacaccaacccctggatgtggtcaaagtgtagtcgaaaatatatcactgagtttttagacactggttatggcgagtgtttgcttaacgaacctgaatccagaccctaccctttgcctgtccaactgccaggcatcctttacaacgtgaataaacaatgtgaattgatttttggaccaggttctcaggtgtgcccatatatgatgcagtgcagacggctctggtgcaataacgtcaatggagtacacaaaggctgccggactcagcacacaccctgggccgatgggacggagtgcgagcctggaaagcactgcaagtatggattttgtgttcccaaagaaatggatgtccccgtgacagatggatcctggggaagttggagtccctttggaacctgctccagaacatgtggagggggcatcaaaacagccattcgagagtgcaacagaccagaaccaaaaaatggtggaaaatactgtgtaggacgtagaatgaaatttaagtcctgcaacacggagccatgtctcaagcagaagcgagacttccgagatgaacagtgtgctcactttgacgggaagcattttaacatcaacggtctgcttcccaatgtgcgctgggtccctaaatacagtggaattctgatgaaggaccggtgcaagttgttctgcagagtggcagggaacacagcctactatcagcttcgagacagagtgatagatggaactccttgtggccaggacacaaatgatatctgtgtccagggcctttgccggcaagctggatgcgatcatgttttaaactcaaaagcccggagagataaatgtggggtttgtggtggcgataattcttcatgcaaaacagtggcaggaacatttaatacagtacattatggttacaatactgtggtccgaattccagctggtgctaccaatattgatgtgcggcagcacagtttctcaggggaaacagacgatgacaactacttagctttatcaagcagtaaaggtgaattcttgctaaatggaaactttgttgtcacaatggccaaaagggaaattcgcattgggaatgctgtggtagagtacagtgggtccgagactgccgtagaaagaattaactcaacagatcgcattgagcaagaacttttgcttcaggttttgtcggtgggaaagttgtacaaccccgatgtacgctattctttcaatattccaattgaagataaacctcagcagttttactggaacagtcatgggccatggcaagcatgcagtaaaccctgccaaggggaacggaaacgaaaacttgtttgcaccagggaatctgatcagcttactgtttctgatcaaagatgcgatcggctgccccagcctggacacattactgaaccctgtggtacagactgtgacctgaggtggcatgttgccagcaggagtgaatgtagtgcccagtgtggcttgggttaccgcacattggacatctactgtgccaaatatagcaggctggatgggaagactgagaaggttgatgatggtttttgcagcagccatcccaaaccaagcaaccgtgaaaaatgctcaggggaatgtaacacgggtggctggcgctattctgcctggactgaatgttcaaaaagctgtgacggtgggacccagaggagaagggctatttgtgtcaatacccgaaatgatgtactggatgacagcaaatgcacacatcaagagaaagttaccattcagaggtgcagtgagttcccttgtccacagtggaaatctggagactggtcagaggtaagatgggagggctgttatttcccctaggtcatctcttacattctagttctggtgctctctatctgtttaagacaaacccttgtgcacctttctcccacctctccctttctcccttgtctcccttgagaaaacaactccagttctctgcctgcaccatgactgtcgtactggatgtaactagtctaccagtgacctcagggcactttgggcttggctagatcactcactgttgtagcttctgttgtgattttgaagttgcagtccatcaccttccctcctctttgagccctagctaagtcactgaaaggaaatcatggatttattaatcataaagctatactagctcacatctgaagtcaacatgaagtttcctacttccttgtctttgaaataagagaattagaccccagggagtgacctctctgacttacccatccaactgcaaaaaaaaaaaaaaaaaaaaaaaaaaa

SEQ ID NO: 57493 - DNA, 2487 bp, Homo Sapiens
gccgcttccctcgccgccgccccgccagcatgcccggcgtggcccgcctgccgctgctgctcgggctgctgctgctcccgcgtcccggccggccgctggacttggccgactacacctatgacctggcggaggaggacgactcggagcccctcaactacaaagacccctgcaaggcggctgcctttcttggggacattgccctggacgaagaggacctgagggccttccaggtacagcaggctgtggatctcagacggcacacagctcgtaagtcctccatcaaagctgcagttccaggaaacacttctacccccagctgccagagcaccaacgggcagcctcagaggggagcctgtgggagatggagaggtagatcccgtagccggcgggcggcgacgtcccgaccagagcgtgtgtggcccgatggggtcatcccctttgtcattgggggaaacttcactggtagccagagggcagtcttccggcaggccatgaggcactgggagaagcacacctgtgtcaccttcctggagcgcactgacgaggacagctatattgtgttcacctatcgaccttgcgggtgctgctcctacgtgggtcgccgcggcgggggcccccaggccatctccatcggcaagaactgtgacaagttcggcattgtggtccacgagctgggccacgtcgtcggcttctggcacgaacacactcggccagaccgggaccgccacgtttccatcgttcgtgagaacatccagccagggcaggagtataacttcctgaagatggagcctcaggaggtggagtccctgggggagacctatgacttcgacagcatcatgcattacgctcggaacacattctccaggggcatcttcctggataccattgtccccaagtatgaggtgaacggggtgaaacctcccattggccaaaggacacggctcagcaagggggacattgcccaagcccgcaagctttacaagtgcccagcctgtggagagaccctgcaagacagcacaggcaacttctcctcccctgaataccccaatggctactctgctcacatgcactgcgtgtggcgcatctctgtcacacccggggagaagatcatcctgaacttcacgtccctggacctgtaccgcagccgcctgtgctggtacgactatgtggaggtccgagatggcttctggaggaaggcgcccctccgaggccgcttctgcgggtccaaactccctgagcctatcgtctccactgacagccgcctctgggttgaattccgcagcagcagcaattgggttggaaagggcttctttgcagtctacgaagccatctgcgggggtgatgtgaaaaaggactatggccacattcaatcgcccaactacccagacgattaccggcccagcaaagtctgcatctggcggatccaggtgtctgagggcttccacgtgggcctcacattccagtcctttgagattgagcgccacgacagctgtgcctacgactatctggaggtgcgcgacgggcacagtgagagcagcaccctcatcgggcgctactgtggctatgagaagcctgatgacatcaagagcacgtccagccgcctctggctcaagttcgtctctgacgggtccattaacaaagcgggctttgccgtcaactttttcaaagaggtggacgagtgctctcggcccaaccgcgggggctgtgagcagcggtgcctcaacaccctgggcagctacaagtgcagctgtgaccccgggtacgagctggccccagacaagcgccgctgtgaggctgcttgtggcggattcctcaccaagctcaacggctccatcaccagcccgggctggcccaaggagtacccccccaacaagaactgcatctggcagctggtggcccccacccagtaccgcatctccctgcagtttgacttctttgagacagagggcaatgatgtgtgcaagtacgacttcgtggaggtgcgcagtggactcacagctgactccaagctgcatggcaagttctgtggttctgagaagcccgaggtcatcacctcccagtacaacaacatgcgcgtggagttcaagtccgacaacaccgtgtccaaaaagggcttcaaggcccacttcttctcagaaaagaggccagctctgcagccccctcggggacgcccccaccagctcaaattccgagtgcagaaaagaaaccggaccccccagtgaggcctgccaggcctcccggaccccttgttactcaggaacctcaccttggacggaatgggatgggggcttcggtgcccaccaaccccccacctccactctgccattccggcccacctccctctggccggacagaactggtgctctcttctccccactgtgcccgtccgcggaccggggacccttccccgtgccctaccccctcccattttgatggtgtctgtgacatttcctgttgtgaagtaaaagagggacccctgcgtcctgc

SEQ ID NO: 57494 - DNA, 4199 bp, Homo Sapiens; identical to SEQ ID NO: 22859

SEQ ID NO: 57495 - DNA, 5597 bp, Homo Sapiens
cgcgcttccgggttggctgtggctgtggctgcggcggcggcgcaggagcagaaaccggtgcggcgcagaagccccagaggcgggcggggcggagcggagggccagcgggccccggcgtgggtctcccgccaggccgccggatttaacccttagtggcttctgaagaaaatggcagaaacatcgccagagccttctgggcagcttgttgtacactcagacgctcacagtgacactgtgctggccagttttgaggatcagaggaagaaaggcttcctctgtgacattactttaatcgtggagaatgtacatttccgggcccacaaagccttacttgctgccagtagtgaatacttctcaatgatgtttgcagaagagggggaaatcggccaatccatttatatgctggaaggcatggttgcagacacctttggtatcctgctggaatttatctacacaggttatctccatgccagtgagaaaagtacagaacaaatcctggctactgctcagttcttaaaagtctatgacctggtaaaggcttacacagacttccaaaataatcatagctccccaaagccaacaactttgaacactgctggtgccccagtggttgttatccctaataagaaaaacgatcctccaaagcggaaacggggaagaccaaaaaaagtcaatacattgcaggaggagaaatcagaactggctgcagaggaagaaatacagttaagagtgaacaattcagttcagaatagacaaaactttgtggttaaaggagacagtggtgtactgaatgagcaaattgcagcaaaagaaaaggaagaatcggagcctacttgtgagccaagtagagaggaggaaatgccagttgaaaaagatgagaactatgatcccaagaccgaggatggccaggcaagccagagtcgatacagcaagcggaggatttggagatccgtcaaacttaaagattacaaacttgttggggatcaagaggaccatggttcagccaagaggatctgtggaaggagaaagcgccctggaggccctgaggcccgctgtaaagactgtggcaaggtctttaagtacaatcactttttagcaatccaccagaggagccacacaggggagcgacctttcaaatgtaatgagtgtggaaaaggctttgcccagaagcactcgctacaggtccacaccaggatgcacacaggcgagcggccgtacacctgcaccgtgtgcagcaaggctctgaccaccaagcactcactgctggagcacatgagcctgcactcaggacagaagtcttttacctgtgatcaatgcggaaaatatttcagccagaacagacagctaaagagccattaccgagttcatacaggccactcattaccggaatgcaaagactgccatcgcaaattcatggatgtgtctcagctaaagaaacatctgcgaacacacacaggtgagaagccatttacttgtgaaatctgtggcaaatctttcacagcaaagagttctcttcagacccacatcagaatccatcgaggagaaaagccatactcctgtggcatttgtggcaaatccttctctgactccagtgccaaaaggagacactgcattctacacactggcaagaagcctttctcctgccctgagtgtaacttacagtttgctcgcttagacaacttgaaggctcacttgaaaattcatagcaaggagaagcatgcttcagatgccagcagcatttctggcagtagtaatacagaagaggtcaggaatattcttcagctacagccatatcaactctctacctcgggagagcaggaaattcagcttctcgtaaccgattctgtacataacatcaatttcatgcccggtcctagccagggaatcagcattgtgactgcagagagttcccaaaacatgactgcagaccaggctgctaatcttaccctgctcacgcagcagccagagcaactgcagaatttaattctttcagctcaacaggagcaaacagaacacattcagagcctcaatatgattgaaagccagatggggccctcacaaacagagccagtgcacgtgatcactctgtccaaggaaacactggaacatcttcatgcccatcaagagcaaacagaggagctccatttagctacaagtacttcagatccagctcagcacctgcagctgacacaggagcctggtccgccaccacccactcaccacgtgccccagccaacgccacttggccaggagcagagctgacctgtaaacacgtttgactgcttgattgggctcttcttataagccagctctgactggattttgaacgcttgaaatcaggctctccacaccattgacttgcagatgcttctgtgagagctgtgatggctaactgatgtttataatgccctccatccaggtagcaagatgtgtgtatgtcttgtctaaggtactgatttgtattgagcatttcaatattattgaatggttttcattttaatctgcaatgtctcataaagactcgggtagtttttctttgggggcattgatctcagtttttctgtaaggtttaaatgttcacagccataggttatggtcttgccaacctccccagttatgtttttttgttttctaggacaaagggagtcattttggttgaactgggcagaatggtttgttctattttcttatttttcttaggcaacacagttgttaccacaagacaagtcagggctaaatatgacagatcacaatgtatggggaatttgcccttttaataatttccagtcccctaagacaaagtaaccctcaacgttttatctttatgcagtacagtgggcttattgtgttaacacttcagaaagattcaaactcataaactcagtattttaactcaaaattcatgtaacaagatagccaaaagcataggatttcttaaaattctgaattcgtcttttctgagaaacataaatttacatatttttcaacagaaggctatcaaaattttaattaagtttaaaatacaaaattggatcaagacattcaccctaaattctgaatttttgtcagaaaagagatttgattttcatgaaggtaaagctttcttcactattctggaacataaaactttattcagtgtaatttaagtcttatatatactctactgaattctaactgatctcctgaaaatgttgatctacgtgttgtgtctgataactttctggagatggaagcttataattcatttttattgcagactagttaaatcccacaaagtgaatatcttctcctaatctttccttttttagagacggggtctcactgtatcacccaggccagagtgtagtggcacaatcattgctcactgtagcctcgaattcctgggctcaagcaaccctcccaccttagcctccctagtagctgggactacagggatgtaccaccacacccagctaatcttcatctaatcttaaaactttgagcctcagagactttgtagccagcatgtgtctgtaattgtatgatttttaaatcatcatcaaaagattaaattatgtttgggttaggttttcaagctaagcttattgaattcttttaccactttcatgtaagctggtaggggatttttgagaaaagaaggtgggcactagtatatctaaattaacaatgctgatggggagtagggggtaatctactctaaaattaatagagcctttccatcaattgttttgttttagacatccttgatttctccctaaatcaaataagttatttggaggttagagtaatagagaattcttcaggtttgagagaagataaaaacattttggttgcatatttgctaagctatattttattatatgtaattcacaaaacttccaaaatgatatatatcttatatgtatcaaccaaactaatgttaaatcaggcctgactagagcaaagataacaattttttacaaacactgttaagccctaagtattatttcaggttctcgtttaaactgtttaattttattcttaaaacacaaagtttttaccaacttttcaaagcccaccaatccacattttctccaggaaattaaatatttaagtaagtgagtgtttactcactctggatagctaggtgattattcagaaaatacggttacatagctatttataagtcaagtttcactggctctataacagtctacctctacactaagagaactataacatgaacaacataggtcactttaaatgttctagtagcaacttttaaaaacataaaaagaagcaggtgaaaatgttaataaaagtttatttaatccaacatttgccaaatatttcaacatataaaaatatattagtgagacattttacattctctttttcatactaagctttcgaaatctggtgtgtattttacactttctgcacatctccatttggatgctaatgttcattggacatacttgatctgtatttagatttcatacaacttacagttgaaaacagattctcatatcaagtagctaagacaaaagtttttttcaagaattgaaataagtatcagtttaaaaatttatattaaatttattaaaattaaaatccagttccttgttgcatgggacacagtgcaaatgcttgataagcacatgtggctagtggctgctatattggacagcatgggccacctgtttctaacttgagcatcagtcctagctatgcctgaattatttgaccagctgtcaaagagaaacaaggaaatgatagctttgttaatctagcctctttctttgtcccacatatacattctacccctttgaataaaaaagttcaatgacgccgggcgtggaggctcatgcctgtaatcccagcactttgggaggccaaggtgggcggatcacgaggtcaggagttcgagggcagcctgaccaacatagtgaaaccccatctctactaaaaatacaaaaattagctgggcgtggtggtgtacccctgtaatcccagctactcgggaggctgagacaggagaatcacttgagcccaggaggcggaggctgcagtgagctgagatcacgccattgcactcaagcctggcgacagagcgagactccgtctcaaaaaaaaaagttaaatgacttgagtacccaaaagaaatgtcgtgaacatgaaagtacttctcatgtgtccttgagaaatgatgttgctagtgcagtgtttcacaattcattttctactaaatgtgtaccattttttaaattgttttaacagaaatatagagtgtgtttcttaggaaatagaatgttatgctttggggctcctgaaacacctcgttttgaaggtgaatctttggttttctcccagaagagggtctgccttgagatgattggagctcttaccatcaaaatcagttattcaagtgcttgcccagtgcttcttgaaactcacctctactctgtattttctacagttggttcttgtgttataaatgttgtgagcaacagattaaatgatgctgaggaatgaaaaaagattctcattataaatgcttacctaggattctcattatagatgcttatctaggttttcataaatgggaatgtaacaat

SEQ ID NO: 57496 - DNA, 2228 bp, Homo Sapiens
acttccctttttccggtccgccggattatgaatgacggccggcgcgagtattttccacataagctggctgtcgtttttctcctggcctctgtggaggcgagtggtctgcgggcagcagctcccagaggcagccttggaattccagctcggactgggcgggaaggcgcaggcggcccaggtcgccgacacgctcacgcaccctccctgcctggccgcgcctctgcgaccaggtgacccaatgaaagaagaaaatgaaagccataaagaaaagtcttacagaagaagaatacctgtacctggacttttctcaccaaacagaaggatgcatctttcctcttcatacatctgtaactttatttctgttatcttactgtgactgtaaaatctttaaaatttgcttagttgtcaccaaagaggtgagtagagatagttcactactaagagatgacctgatccaggatgttgaaatacggattatttcaaggcaggagctcccaccaatagtccaaaattgctgtttgcctgcagtagtagaacgatcagacaatttttgtagagcaggacttgctgttgtattgagacacataatccagaaatcctatgaagcagaccccttaaagaaggaacttttggaacttctgggctttaaaaagacttgcttgaaagcctgtgctgaagttagtcagtggaccaggctatgtgaactcaccatccctttggctattgagaattttctcagagaatcttctgaccagcccccaactatacctgtagaaatactacagctagagaaaaagcttagtgagcctgttagagtgcataatgatgataaactccgcaggcagaagctcaagcaacagaaggctgatggagttgggcctccccttactaagggaaaggcaaagagcaaggtccacacacaggaaacatctgaagggttggattcttcatccaagagtctggaactgaaagtggcattctcaaagctcacagtacaggaagaaccagctactaccaacagagagccttctcacatcagaaaagcaaaagcctccgaccttccacctctggagcatgtgtttgcagaagggctttacttcactctggcagatattgtgctcttgccctgtatccatcatttcttggtaattatcagcaggaaattttctgagaagctggtagaatttccattgctagcctcttggtaccagaggattcaggaagtgccaggagtaaaaacagcagcttctaagtgtgggatccaatttctccatttaccaaagttgttgacaacctcaactgaacagcatccaaacttatgtgaagtcccaggtgtagaagagcaaagcgatcctttatttataggaggaccaagaccaaccatggccaagttaatggaaaagggcattgaagtgatgttttctccccacccttgccctacttggactcttgattggaatgttctccctgcagcagtcagcccaaaggaaggtaaaatgtccagtgatcgagctttgaggaagcagcaacagttgaacaaccttgtctatgtggtaacaaatcaggccaaacctggtgacagaattgtggatttctgcagcggtggggtattttatctctcctttcatcctttttagtctttctaagattatgagacttttctatattacattcaaggtcatgtttttatttggcaagattgtggtttcagaatgaggaaaagctgtggggaccaaagctaacttgtttgtcttactgactttttcagggccatgttggaattgtccttgctcacatgctgccatcatgtcaggtaaagccagaataagagataaaaggaaatattttaaaattatacagttcagctagccaaatttggtttatcccgctcttggagtttctagtcactcacccaagtcaaatatgtggcacaggcattgtcttttctttgaaataaactttcaagactcagaatcttaaggaaaaaaaagtaaagtaagatcataaaacatttatcaatttttaaaagaggtttataggtttaagtaatttttcaaagaagtagctattttattgctaaataaaataattatgattcaactagtttaattttcaatataattttaaatggaaatattgacctctgaaacttgctgagcatattcttttggtatcttgattttgatccattgcatcaaaattataacaatagcaaaattttttaaagc

SEQ ID NO: 57497 - DNA, 6485 bp, Homo Sapiens
tgcagccatgctgaatcactgttgctgatcagatttcccactggtctgctgggagaatcaagaacagaactaggatccccgagtgcatacacagttcagcagctaccaccctggctgggcctcacacaatggagggtgaaagtgtcaagctgagctcccagactctgatacaggctggggatgatgagaagaaccagaggacgatcactgtcaaccctgcccacatggggaaagcattcaaggttatgaatgaactgcggagtaaacagctgttgtgtgacgtgatgattgtggcagaagatgtcgagatagaagcccaccgtgtggtcctggcagcctgcagcccctacttctgtgcgatgttcacaggtgacatgtctgagagtaaagccaaaaagatagaaatcaaggacgtggatgggcagacgctgagtaagctgattgactacatctatactgctgaaatcgaggtgactgaagagaatgtccaggtgctgctcccggcagccagcttgctgcagctcatggatgttcggcagaactgctgtgacttcctgcagtctcagttgcatcccaccaattgcctgggcatccgtgcgtttgcagatgtacacacctgcactgaccttctgcagcaggccaatgcctacgcagagcagcactttccagaggtgatgctaggagaagaatttcttagcctgagtctggaccaggtgtgcagcttgatatccagcgacaagctgaccgtttcttcagaagagaaggtgtttgaagctgtgatctcatggatcaattatgagaaagaaaaccgtttagagcacatggcaaagctgatggaacatgtccgacttcctctcttacctagggactacctagtccaaacggttgaagaagaagctttgataaagaataacaacacctgtaaagacttcctcattgaggccatgaaataccatctcctccctctggatcagagactattgattaagaacccaaggaccaagcccaggactccagtcagccttcccaaggtcatgattgtggttggcggccaggcacccaaggcaatccgcagtgtggagtgctatgatttcgaggaggaccggtgggatcagattgctgagcttccttccagaagatgcagagcaggtgtggtgttcatggctggccacgtgtatgccgtgggagggtttaatggctcactgcgggtgcggacagtggatgtgtatgacggcgtgaaggaccagtggacgtccattgccagcatgcaggagcgccggagcacactgggcgcagcggtgctcaatgacttgctctacgcagtgggaggctttgatggcagtactggcctagcatcggtggaagcctacagctacaagaccaacgagtggttctttgtggccccgatgaacacgcggcagagcagtgtgggtgtgggcgttgtggaggggaagctatatgctgttgggggttatgatggagcttcccgccagtgtctgagcactgtggaacagtacaacccagcgaccaatgaatggatatacgtggcggacatgagcacccgccgcagtggcgcaggggttggagtgcttagcggacagctgtacgccacaggtgggcatgatgggcctttggtgaggaagagcgttgaggtttacgatcctggaacaaatacctggaagcaagtggcagacatgaacatgtgccggcgcaacgcaggggtctgtgcagtaaatgggctcctgtatgtggttggaggggatgatggatcctgcaacttggcttcggtggagtactacaatcctgtcactgacaaatggacgctgcttccaacgaacatgagcacggggcggagctatgcaggtgttgccgtgattcacaagtccttgtgacccaaactcctactgccaggaggtggaggaaggagcaggtgctgcctgtgactctgaacagcaggaccttggtgactggattcaacttgcttgggagggtctgtgctgctgtgagaaccgctctcctctgacttggcagactggtgttgttcatcgcagtgtggacaccattacccacccccgttcccctgaggtgctctggcctatgccctgagcaaggggggtcttgacatccccaggcagcacctttgggctttgttttggtgtttctacagggacaatacagaccctggagtgtgtgtgtgtgtgtgtgtagaccatggtgtttctctatgtttctctaagttggggggtgagcgtgtgtgacagtctactggatttctttactactgatcctttcgctgtgttaaaaatcaagtcacagagacctctcttctggatttgtcccatggggaccctgagactactaaagctgctttcttctgaaggtccagttggacagtctgggaatgtccagaaataaccagtgagaggggcagttctctggccacacccacttatgtactttaactactgtgactttgtctgcagaagagctggaaaattctcgaagctgcaccgtgtcctctgtgtgctagaataagggacaaatgggttccctgtgcttctcagctcactgtttttccttgagttctcctacaggaagcagatgagaactgcccagtcttcaggtttaggccattggtctttgatgtcatagattccaggcctgggaggtgttatgtctcttcagctgggaaaactagctcttcagagaagcctcgggtaacactgaaaaacaaaacaaaacaaaacaaaaacaggaaaaaaacaaaaaaccaaagtggtaaggattcagttcctgcctataatggtctcagagagggtcctacttttaggttttcccaggacaggacagtccccatttatacttattatcccagtttaattattcacagcaccccattttactcagaagtgttctggtctggaggataaataagaggtcaccctcctccagacccaaagatagatttgtgcctgtgttggatggggtcgtgtgtgattcagatggacattggatggcttcaaaggaatataccactagagctggcccttggcactttgtgacagtggtcaagtctgtctaatgtccttgtcttctttttcttgtgctttccccctattccagggtgtgcaccctctccccaacccccaagaaccccactactgctttccctgtgaggtaggagatatcagtgggtcttggatttgaggcttcctaagatgtgcttgcattttaaaaagggagcttggtgagagctttgctaattcacaggtaaaaattattaacaatagaacttcaagcatcttgaggagcgggcatttgagggggcatggagtaatttgtatttaaaaaaccttaaagttgtgctgttcctaaactagcaaattgctcatgctgaaatttctggcataagcaggggaagtcttgtgtctggagaatagtctcataccttgcagtctgggacaccctccctactttgagaatccacctacaggaagccaaggaactttataaatcctgatgttggacttctgatacgactgggctacttccaagcaggtgctgcaggagattggcatcccccagcccctgcagttagaaaccccgaagtcttcccagccagtgagccactttgtgtatttactgtatatttattgtgccctaaatgtgcaactctcctaaagacaaaacttctctttctgatgttaagcacatgttacttcaacaagatgcttggagaacaacaaggtacccagaatttttagaagccttcagaagaggctaaaatatccagctttgggggacctggaagaaatgtctccaaaggaagcaaggcatgttttagttgagtgctctggtctcactatgaagtggggatgactgtggcttcataactctacctggctgtgggttggaagctgatggaatgagaaatgtcctttctccttctctgaggaaattttgagacttgtttcggtgtgtctgtgtgatggggatgaggctggggttgggatctgatgtatgccattcacagaagctctcaatttcagatgataggtgaattccctgcccctcccccaccactgagaagctagactttcatgcgggagaggctacttttatgtgtcgtcttccggggaagggtccctccactgaaagctagccagtcatgttttctgtttttggatttttgcaattggtttcacctcatgtctccctccctacaaagcactgcctctactgggcgtgctgccaaggccatgtgcactccatcctcatgtatcctttttcacggggaccagaacactggtacgtcatcaccaaagccaatctgctctagctgcccacagatgccaccaaaacctgctatctcttcatcaccaggtacgattctctttccacagtggacacagcaggctattttctagtttgtgctggtcacgtggtagatgaagcctcttactgccccacttagggtggccacggctgcttgtgaatgcagctttgccagtggcatatctgtcatctgattgcggtggtgaaatggaattgaggcccaaggttagaagcagccgagacgccacttggatactgatttgaacaatgtagaagtcagattctgaattccaaagttatttctcataagtacccaatggcatctctccatctacaaagttgcagtattatgcaaataaaactgacctcattttctgctatgcaataagaatacttaattctagttcccgacaagccagttgcaatatcccctaagatgctttttgagctgtcttactttgatatctgttgtgtaacgtttgtatatttctgagccagatcctttcaaagattgcctttttataaaattgaagctatagcttttaggctaaaattttaacgtagatatttttataagatatttttttcaagagtttgaatcgctttttattgtccatggtaatgaaatgttgtgttctttgcatcattcactctcaaacgtagttcatgcctgtagctctcttccttttgtttctcacccttcagaaacatatttttcagtagctccaggtagatgagcctttttttttttttttttaaataccatattcaagggagtctgctgaattttaaaacgcagtcactggtgtttcttgaattgctagggactgatgttatgttcgactcagcacttgcccgtctgtattgattgtgtctttttttttttttttggagtctgctttctgtgggggtgaggccgggctgtctcgtggtggctcccactgacgggcactgagcctggtaccctgtggcatggagaagcctcagggaaaggcctgcccccccagcacatactcccatagtgtcctaggtccagccgaccattccttattctcttctatctccttgttgatctgaagcttccaatagcttgaggcctttgctgctggatgatgccctttttgggagcatcttgtctctaacctttaaaagaggggtcaatcctcatgatccctgtgtgttaagcatatgctttgcaggtgctcacactacacttacaacttgcttcttgagctatgtctctactccaggctctgttttgtgtatttatctgccatttgcatcatggtttttaaaatttattattattattattattgttgggacaggtgccatttaaattgcctccatgctccccatttgcacctagctggatcaagttgggaggctgagcaaactcatattccagttagttggagtttttaaaggctctgtttgcctggagaagcaaggaggttagaatgtaatttttttaagcgtttgcactatttagagtcctaagcccctcatgttcagctgtgctgtgtttctactgaccaagcaggagagccagcagcacttccagcatttgggaatggaagagatttcttctgtagtggataattacagcctcatagcccctgtgcagccttcgtcatgggactcagtgactcatggatatagcatcagccatggcaggaatgcacaggactgtggcatttgcagcatcaaatcaccctagtgccatgtttggttatgagattgtaaattattcgctcccccgtcctcccctcccctcattttcagtggcaatagaggacccttgttgtacttcttgtttaatttgcatattatgtgtaaaatgctttcgttgaaagaaaactgaagacactgaatgtgtatgtctgtgtgggtgctctgtccctgtggttgtcatagccagtcagacttgatcactgacaccccgtacaacatattgcataggtaagatcctcgatctggtgttctctgcgtggctgttagggactgtatatcttgtaaaagaacacttgtcacatgcttgatcagttacagcaatagctgaagaaacatttcctcaaatgtattattttaacaggaatcatgttctaatttcccatcctttaattttaataaaagctgaactgtgtgaa

SEQ ID NO: 57498 - DNA, 7556 bp, Homo Sapiens; identical to SEQ ID NO: 30767

SEQ ID NO: 57499 - DNA, 2761 bp, Homo Sapiens
agaggacgcccggtgaaggggctccagcctggcagtttctgcgtgttagcatttctagaatagagtgggtgggaactgacccaagtaaagtcccagagactcgaacactgacgcacaggaaagcctcaagtgggaggagaaatgcaaatcccctactgatgatggcgtcagcggctttctcctagggactgtgaggggcgcttctgactttggacttgagcactgcctgggacctgtgctgagagagcgctagcatgtctcagtggaatcaagtccaacagttagaaatcaagtttttggagcaggtggatcaattctatgatgacaactttcccatggaaattcggcatctgttggcccaatggattgaaaatcaagactgggaggcagcttctaacaatgaaaccatggcaacgattcttcttcaaaacttgttaatacaactggatgaacagttaggtcgtgtttccaaagagaaaaacctactcttgatacacaatctaaaaagaattaggaaggtccttcagggaaaatttcatggaaatccaatgcatgtagctgtggttatttcaaactgtttaagggaagagaggagaatattggctgcagccaacatgcctgtccaggggcctctagagaaatccttacaaagttcttcagtttcagaaagacagaggaatgtggagcacaaagtggctgccattaaaaacagtgtgcagatgacagaacaagataccaaatacttagaagatctgcaagacgaatttgactacaggtataaaacaattcagacaatggatcagagtgacaagaatagtgccatggtgaatcaggaagttttgacactgcaggaaatgcttaacagcctcgatttcaagagaaaggaggctctcagtaaaatgacccaaatcatccatgagacagacctgttaatgaacaccatgctcatagaagagctgcaagactggaagcggcggcagcaaatcgcctgcatcgggggtccactccacaatgggctcgaccagcttcagaactgctttacactattggcagaaagtcttttccaactgagaaggcaattggagaaactagaggagcaatctaccaaaatgacatatgaaggtgatcccattccaatgcaaagaactcacatgctagaaagagtcaccttcttgatctacaaccttttcaagaactcatttgtggttgagcgacagccatgtatgccaacccaccctcagaggccgttggtacttaaaaccctaattcagttcactgtaaaactaaggctactaataaaattgccagaactaaactatcaggtaaaggttaaggcatcaattgacaagaatgtttcaactctaagcaaccgaagatttgtactttgtggaactaatgtcaaagccatgtctattgaagaatcttccaatgggagtctctcagtagaatttcgacatttgcaaccaaaggaaatgaagtccagtgctggaggtaaaggaaatgagggctgtcacatggtgactgaagaacttcattccataacgtttgaaacacagatctgcctctatggcctgaccatagatttggagaccagctcattgcctgtggtgatgatttccaatgtcagtcagttacctaatgcttgggcatccatcatttggtacaacgtgtcaaccaacgattcccagaacttggttttctttaataatcctccacctgccacattgagtcaactactggaggtgatgagctggcagttttcatcgtacgttggtcgtggtcttaactcagatcaactccatatgctggcagagaagcttacagtccaatctagctacagtgatggtcacctcacctgggccaagttctgcaaggaacatttacctggtaaatcatttaccttttggacatggcttgaagcaatattggatctaattaagaaacacattcttcccctttggattgatgggtatgtcatgggctttgttagcaaagagaaggaacggctgttgctaaaggataaaatgcctggcacctttttattaagattcagtgaaagccatctcggaggaataactttcacctgggtggaccattctgaaagtggggaagtgagattccactctgtagaaccctacaataaaggccggttgtctgctctgccattcgctgacatcctgcgagactacaaagttattatggctgaaaacattcctgaaaaccctctgaagtacctatatcctgacattcccaaagacaaagccttcggtaaacactacagctctcagccttgcgaagtttcaagaccaacagaaaggggtgacaaaggttatgttccttctgtttttatccccatctcaacaatccgaagtgattcaacagagccacattctccatcagaccttcttcccatgtctccaagtgtgtatgcggtgttgagagaaaacctgagtcccacaacaattgaaactgcaatgaagtctccttattctgctgaatgacaggataaactctgacgcaccaagaaaggaagcaaatgaaaaagtttaaagactgttctttgcccaataaccacattttatttcttcagctttgtaaataccaggttctaggaaatgtttgacatctgaagctctcttcacactcccgtggcactcctcaattgggagtgttgtgactgaaatgcttgaaaccaaagcttcagataaacttgcaagataagacaactttaagaaaccagtgttaataacaatattaacag

SEQ ID NO: 57500 - DNA, 5503 bp, Homo Sapiens; identical to SEQ ID NO: 29057

SEQ ID NO: 57501 - DNA, 3107 bp, Homo Sapiens
cggtgagtcttggcggctgttaacgcgcgctttgggaacaggaaggttgagagagaggtgctggggtctgcgtctatctctgtcgctcttttcagcccctcctggtattcccctcctaacctgggttttttacacgcccgcgtggcttcctgctcgacctccctgagtctgatcctggtttccacctccagccctgggaaatttcctttctccagactcgccctccccacccgggcctcggactttcaccccagcttctctctcctggccagtgattacccacccccaatcccaccccgccccgccgcgcaactacctcctcccttcacccggactgggaccatcatccccactccactccgcccagtctgggactccacctgcctcctccccaatcccacactaatctctgcttggtctcttcctctttggcctaatctctcgtctcggcttattggggacggccactctcacagtttggttccaaacaccagttcctggatggattcccgccatccatgccccctctttaattagccggtcctctcagtaatgtagcagccccctctacagattagaccctggtcctacactcttagccgctgcctgcttttgacctttggctcatgggtacttgacgttttaaactcctaggcccaggatgaggaggagcttggctcccagccagctggccaagagaaaacctgaaggcaggtcctgtgatgatgaagactggcaacctggcctagtgactcctaggaaacggaaatccagcagtgagacccagatccaggagtgtttcctgtctccttttcggaaacctttgagtcagctaaccaatcaaccaccttgtctggacagcagtcagcatgaagcatttattcgaagcattttgtcaaagcctttcaaagtccccattccaaattatcaaggtcctctgggctctcgagcattgggcctgaaaagggctggggtccgccgggccctccatgaccccctggaaaaagatgccttggttctgtatgagcctcccccgctgagcgctcatgaccagctgaagcttgacaaggagaaactccctgtccatgtggttgttgaccctattctcagtaaggttttgcggcctcatcagagagagggagtgaaattcctgtgggagtgtgtcaccagtcggcgcatccctggcagccatggctgcatcatggctgatgagatgggcctaggaaagacgctgcagtgcatcacattgatgtggacacttttacgccagagtccagagtgcaagccagaaattgacaaggcagtggtggtgtcgccttccagcctggtgaagaactggtacaatgaggttgggaaatggctcggagggaggatccaacctctggccatcgatggaggatctaaggatgaaatagaccaaaagctggaaggattcatgaaccagcgtggagccagggtgtcttctcccatcctcatcatttcctatgagaccttccgccttcatgttggagtcctccagaaaggaagtgttggtctggtcatatgtgacgagggacacaggctcaagaactctgagaatcagacttaccaagccctggacagcttgaacaccagccggcgggtgctcatctccggaactcccatccagaatgatctgcttgagtatttcagcttggtacattttgttaattccggcatcctagggactgcccatgaattcaagaagcattttgaattgccaattttgaagggtcgagacgctgctgctagtgaggcagacaggcagctaggagaggagcggctgcgggagctcaccagcattgtgaatagatgcctgatacggaggacttctgatatcctttctaaatatctgcctgtgaagattgagcaggtcgtttgttgtaggctgacaccccttcagactgagttatacaagaggtttctgagacaagccaaaccggcagaagaattgcttgagggcaagatgagtgtgtcttccctttcttccatcacctcgctaaagaagctttgtaatcatccagctctaatctatgataagtgtgtggaagaggaggatggctttgtgggtgccttggacctcttccctcctggttacagctctaaggccctggagccccagctgtcaggtaagatgctggtcctggattatattctggcggtgacccgaagccgtagcagtgacaaagtagtgctggtgtcgaattacacccagactttggatctctttgagaagctgtgccgtgcccgaaggtacttatacgtccgcctggatggcacgatgtccattaagaagcgagccaaggttgtagaacgcttcaatagtccatcgagccctgactttgtcttcatgctgagcagcaaagctgggggctgtggcctcaatctcattggggctaaccggctggtcatgtttgaccctgactggaacccagccaatgatgaacaagccatggcccgggtctggcgagatggtcaaaagaagacttgctatatctaccgcctgctgtctgcagggaccattgaggagaagatcttccagcgtcagagccacaagaaggcactgagcagctgtgtggtggatgaggagcaggatgtagagcgccacttctctctgggcgagttgaaggagctgtttatcctggatgaagctagcctcagtgacacacatgacaggttgcactgccgacgttgtgtcaacagccgtcagatccggccaccccctgatggttctgactgcacttcagacctggcagggtggaaccactgcactgataagtgggggctccgggatgaggtactccaggctgcctgggatgctgcctccactgctatcaccttcgtcttccaccagcattctcatgaggaacagcggggcctccgctgataaccagctggtctgggtgtagctcttagaggaaggagatagggaaaaggggctccttgctccacagggccctgttgaattttgttctctgggagaaaatcatcaagaagggctgcatgatgtttgcccaaaatttattttataagaaaaacttttttggttaaaaaaaagaataaaggtatgaaagggttaaaaaaaaaaa

SEQ ID NO: 57502 - DNA, 1172 bp, Homo Sapiens
gagacattcctcaattgcttagacatattctgagcctacagcagaggaacctccagtctcagcaccatgaatcaaactgcgattctgatttgctgccttatctttctgactctaagtggcattcaaggagtacctctctctagaaccgtacgctgtacctgcatcagcattagtaatcaacctgttaatccaaggtctttagaaaaacttgaaattattcctgcaagccaattttgtccacgtgttgagatcattgctacaatgaaaaagaagggtgagaagagatgtctgaatccagaatcgaaggccatcaagaatttactgaaagcagttagcaaggaaatgtctaaaagatctccttaaaaccagaggggagcaaaatcgatgcagtgcttccaaggatggaccacacagaggctgcctctcccatcacttccctacatggagtatatgtcaagccataattgttcttagtttgcagttacactaaaaggtgaccaatgatggtcaccaaatcagctgctactactcctgtaggaaggttaatgttcatcatcctaagctattcagtaataactctaccctggcactataatgtaagctctactgaggtgctatgttcttagtggatgttctgaccctgcttcaaatatttccctcacctttcccatcttccaagggtactaaggaatctttctgctttggggtttatcagaattctcagaatctcaaataactaaaaggtatgcaatcaaatctgctttttaaagaatgctctttacttcatggacttccactgccatcctcccaaggggcccaaattctttcagtggctacctacatacaattccaaacacatacaggaaggtagaaatatctgaaaatgtatgtgtaagtattcttatttaatgaaagactgtacaaagtataagtcttagatgtatatatttcctatattgttttcagtgtacatggaataacatgtaattaagtactatgtatcaatgagtaacaggaaaattttaaaaatacagatagatatatgctctgcatgttacataagataaatgtgctgaatggttttcaaataaaaatgaggtactctcctggaaatattaagaaagactatctaaatgttgaaagatcaaaaggttaataaagtaattataact

SEQ ID NO: 57503 - DNA, 1515 bp, Homo Sapiens
tcgcgcctcgctctggccctgcaggttgtgtttccgcctctaccccgcctccattccgttgctctctcagtctcagacccgggctctcggtccgccgcttcaggtcttggcgcagcctcagagagttggcgcggctctgtgttgaccaaacctagtggatgcagttagcgccggagcccggccccgcccgtcaccagggttattcccgccttctaggtttgccaggactgccggccctgcagctgccttctgccccaggtttttggctactgatgttacaaacaataaaatattggagcatagagttgaagaacagactcaaaccaggtttttatttaattagttaaaaatatggatcctgagacaaggggacaagagattatcaaagtgacacctcttcaacaaatgcttgcctcatgtactggagctatactgacatcagtaatagtgacacccctggatgttgttaaaattagactccaagcccaaaacaacccactccccaaaggaaaatgttttgtatatagtaatggactcatggatcatctatgtgtctgtgaagagggaggcaacaaactatggtataagaagccaggaaatttccagggaacattggatgcattttttaaaatcattcgaaatgagggcattaaatctctatggagtggccttcctcctaccctagtgatggcagttcctgccacagttatttattttacctgctatgatcaattaagtgctcttctgagatctaagttaggagaaaatgaaacctgcataccaattgttgctggaattgtagccagatttggtgcagtaactgtgataagtccactagaattgattagaaccaagatgcagtccaagaagttttcttacgtggaactgcatcgatttgtcagcaagaaagtatctgaagatggttggatttccctttggaggggctgggctcctactgttcttagagatgtacctttctcagcaatgtactggtataactatgaaattttaaagaagtggttatgtgagaaatctggtttatatgagccaacatttatgatcaactttacttcaggggcattgtctggttcttttgctgctgttgcaactttaccatttgatgtagtaaaaacacaaaagcagacacaactttggacatatgaaagtcataaaatttctatgcctttgcatatgtcaacctggattataatgaagaacattgttgctaaaaatggattttccggattattttcaggcctaattcctcgcttaattaaaattgctcctgcttgtgccattatgatcagtacatatgaatttggaaaggcttttttccagaaacaaaatgttcgaaggcagcaatactagtgatgctgtttcaacttgaaacaacaactatagccaaagaagatggagactcttaggcaagaatgtttttcaccattattctctcacaatgattttatgtctttctttcctataatttaaataaataatttcagctctacctctaaa

SEQ ID NO: 57504 - DNA, 6103 bp, Homo Sapiens; identical to SEQ ID NO: 29542

SEQ ID NO: 57505 - DNA, 2165 bp, Homo Sapiens; identical to SEQ ID NO: 30751

SEQ ID NO: 57506 - DNA, 5418 bp, Homo Sapiens
aaagcaaaagaattcgctgcgtttccatgaaatcctgcggagtgtcgctcgctaccgccgccgctgccgccgccgctttcggtgatgaggaaaagaaaatggcggcgggaaaagcgagcggcgagagcgaggaggcgtcccccagcctgacagccgaggagagggaggcgctcggcggactggacagccgcctctttgggttcgtgagatttcatgaagatggcgccaggacgaaggccctactgggcaaggctgttcgctgctatgaatctctaatcttaaaagctgaaggaaaagtggagtctgatttcttttgtcaattaggtcacttcaacctcttattggaagattatccaaaagcattatctgcataccagaggtactacagtttacagtctgactactggaagaatgctgcctttttatatggtcttggtttggtctacttccattataatgcatttcagtgggcaattaaagcatttcaggaggtgctttatgttgatcccagcttttgtcgagccaaggaaattcatttacgagttgggcttatgttcaaagtgaacacagactatgagtctagtttaaagcattttcagttagctttggttgactgtaatccctgcactttgtccaatgctgaaattcaatttcacattgcccacttatatgaaacccagaggaaatatcattctgcaaaagaagcttatgaacaacttttgcagacagagaatctttctgcacaagtaaaagcaactgtcttacaacagttaggttggatgcatcacactgtagatctcctgggagataaagccaccaaggaaagctatgctattcagtatctccaaaagtccttggaagcagatcctaattctggccagtcctggtatttcctcggaaggtgctattcaagtattgggaaagttcaggatgcctttatatcttacaggcagtctattgataaatcagaagcaagtgcagatacatggtgttcaataggtgtgctatatcagcagcaaaatcagcccatggatgctttacaggcctatatttgtgctgtacaattggaccatggccatgctgcagcctggatggacctaggcactctctatgaatcctgcaaccagcctcaggatgccattaaatgctacttaaatgcaactagaagcaaaagttgtagtaatacctctgcacttgcagcacgaattaagtatttacaggctcagttgtgtaaccttccacaaggtagtctacagaataaaactaaattacttcctagtattgaggaggcgtggagcctaccaattcccgcagagcttacctccaggcagggtgccatgaacacagcacagcagaatacttctgacaattggagtggtggacatgctgtgtcacatcctccagtacagcaacaagctcattcatggtgtttgacaccacagaaattacagcatttggaacagctccgcgcaaatagaaataatttaaatccagcacagaaactgatgctggaacagctggaaagtcagtttgtcttaatgcaacaacaccaaatgagaccaacaggagttgcacaggtacgatctactggaattcctaatgggccaacagctgactcatcactgcctacaaactcagtctctggccagcagccacagcttgctctgaccagagtgcctagcgtctctcagcctggagtccgtcctgcctgccctgggcagcctttggccaatggacccttttctgcaggccatgttccctgtagcacatcaagaacgcggggaagtacagacactattttgataggcaataatcatataacaggaaatggaagtaatggaaacgtgccttacctgcagcgaaacgcactcactctacctcataaccgcacaaacctgaccagcagcgcaaaggagccgtggaaaaaccaactatctaactccactcaggggcttcacaaaggtcagagttcacattcggcaggtcctaatggtgaacgacctctctcttccactgggccttcccagcatctccaggcagctggctctggtattcagaatcagaacggacatcccaccctgcctagcaattcagtaacacagggggctgctctcaatcacctctcctctcacactgctacctcaggtggacaacaaggcattaccttaaccaaagagagcaagccttcaggaaacatattgacggtgcctgaaacaagcaggcacactggagagacacctaacagcactgccagtgtcgagggacttcctaatcatgtccatcagatgacggcagatgctgtttgcagtcctagccatggagattctaagtcaccaggtttactaagttcagacaatcctcagctctctgccttgttgatgggaaaagccaataacaatgtgggtactggaacctgtgacaaagtcaataacatccacccagctgttcatacaaagactgataactctgttgcctcttcaccatcttcagccatttcaacagcaacaccttctccaaaatccactgagcagacaaccacaaacagtgttaccagccttaacagccctcacagtgggctacacacaattaatggagaagggatggaagaatctcagagccccatgaaaacagatctgcttctggttaaccacaaacctagtccacagatcataccatcaatgtctgtgtccatataccccagctcagcagaagttctgaaggcatgcaggaatctaggtaaaaatggcttatctaacagtagcattttgttggataaatgtccacctccaagaccaccatcttcaccataccctcccttgccaaaggacaagttgaatccacctacacctagtatttacttggaaaataaacgtgatgctttctttcctccattacatcaattttgtacaaatccgaacaaccctgttacagtaatacgtggccttgctggagctcttaagttagacctgggacttttctctactaaaactttggtggaagctaacaatgaacatatggtagaagtgaggacacagttgttgcagccagcagatgaaaactgggatcccactggaacaaagaaaatctggcattgtgaaagtaatagatctcatactacaattgctaaatatgcacagtaccaggcctcctcattccaggaatcattgagagaagaaaatgaaaaaagaagtcatcataaagaccactcagatagtgaatctacatcgtcagataattctgggaggaggaggaaaggaccctttaaaaccataaagtttgggaccaatattgacctatctgatgacaaaaagtggaagttgcagctacatgagctgactaaacttcctgcttttgtgcgtgtcgtatcagcaggaaatcttctaagccatgttggtcataccatattgggcatgaacacagttcaactatacatgaaagttccagggagcagaacaccaggtcatcaggaaaataacaacttctgttcagttaacataaatattggcccaggtgactgtgaatggtttgttgttcctgaaggttactggggtgttttgaatgacttctgtgaaaaaaataatttgaatttcctaatgggttcttggtggcccaatcttgaagatctttatgaagcaaatgttccagtgtataggtttattcagcgacctggagatttggtctggataaatgcaggcactgttcattgggttcaggctattggctggtgcaacaacattgcttggaatgttggtccacttacagcctgccagtataaattggcagtggaacggtacgaatggaacaaattgcaaagtgtgaagtcaatagtacccatggttcatctttcctggaatatggcacgaaatatcaaggtctcagatccaaagctttttgaaatgattaagtattgtcttctaagaactctgaagcaatgtcagacattgagggaagctctcattgctgcaggaaaagagattatatggcatgggcggacaaaagaagaaccagctcattactgtagcatttgtgaagtggaggtttttgatctgctttttgtcactaatgagagtaattcacgaaagacctacatagtacattgccaagattgtgcacgaaaaacaagcggaaacttggaaaactttgtggtgctagaacagtacaaaatggaggacctgatgcaagtctatgaccaatttacattagctcctccattaccatccgcctcatcttgatattgttccatggacattaaatgagaccttttctgctattcaggaaataacccagttctgcaccactggtttttgtagctatctcgtaaggctgctggctgaaaactgtgtctatgcaaccttccaagtgcggagtgtcaaccaactggacgggagagagtactgctcctactccaggactctcacaaagctgatgagctgtacttcagaaaaaaataataatttccatgttttgtatatatctgacaaaactggcaacatcttacagactactgacttgaagacaacctcttttatatttctctatttctgggctgatgaatttgttttcatctgtcttttcccccttcagaattttccttggaaaaaaaatactagcctagctggtcatttctttgtaaggtagttagcaattttaagtctttctttggtcaacttttttttaatgtgaaaagttaggtaagacacttttttactgcttttatgtttttctgtcttgttttgagaccatgatggttacacttttggttcctaaataaaatttaaaaaattaacagccaagtcacaaaggtaatggattgcacatagactaaggaataaacttcagatttgtgatttttgtttctaatcttgatgtaaatttacactattataatacatatttattgcttgaaaatatttgtgaatggaatgctgttattttttccagatttacctgccattgaaattttaaggagttctgtaatttcaaacactactcctattacattttctatgtgtaaataaaactgcttagcattgtacagaaacttttattaaaattgtttaatgtttaaagagtttctattgtttgagtttaaaaaagactttatgtacagtgcccagttttgttcattttgaaatctgataaatatatttatatatacttatgtatgtatatataatatatatagaaatctggatatatatgtataaatctttagaacttaaatttttctcgtttagttcacatctatggtagatttttgaggtgtctactgtaaagtattgcttacaaaaagtatgattatttttaaagaaatatatatggtatgtatcctcaagacctaaaatgtcagactggtttattgttaagttgcaattactgcaatgacagaccaataaacaattgctgccaaaaaaaaaa

SEQ ID NO: 57507 - DNA, 3342 bp, Homo Sapiens
aatatcaacctgtttcctcctcctccttctcctcctcctccgtgacctcctcctcctctttctcctgagaaacttcgccccagcggtgcggagcgccgctgcgcagccggggagggacgcaggcaggcggcgggcagcgggaggcggcagcccggtgcggtccccgcggctctcggcggagccccgcgcccgccgcgccatggcccgaagaccccggcacagcatatatagcagtgacgaggatgatgaggactttgagatgtgtgaccatgactatgatgggctgcttcccaagtctggaaagcgtcacttggggaaaacaaggtggacccgggaagaggatgaaaaactgaagaagctggtggaacagaatggaacagatgactggaaagttattgccaattatctcccgaatcgaacagatgtgcagtgccagcaccgatggcagaaagtactaaaccctgagctcatcaagggtccttggaccaaagaagaagatcagagagtgatagagcttgtacagaaatacggtccgaaacgttggtctgttattgccaagcacttaaaggggagaattggaaaacaatgtagggagaggtggcataaccacttgaatccagaagttaagaaaacctcctggacagaagaggaagacagaattatttaccaggcacacaagagactggggaacagatgggcagaaatcgcaaagctactgcctggacgaactgataatgctatcaagaaccactggaattctacaatgcgtcggaaggtcgaacaggaaggttatctgcaggagtcttcaaaagccagccagccagcagtggccacaagcttccagaagaacagtcatttgatgggttttgctcaggctccgcctacagctcaactccctgccactggccagcccactgttaacaacgactattcctattaccacatttctgaagcacaaaatgtctccagtcatgttccataccctgtagcgttacatgtaaatatagtcaatgtccctcagccagctgccgcagccattcagagacactataatgatgaagaccctgagaaggaaaagcgaataaaggaattagaattgctcctaatgtcaaccgagaatgagctaaaaggacagcaggtgctaccaacacagaaccacacatgcagctaccccgggtggcacagcaccaccattgccgaccacaccagacctcatggagacagtgcacctgtttcctgtttgggagaacaccactccactccatctctgccagcggatcctggctccctacctgaagaaagcgcctcgccagcaaggtgcatgatcgtccaccagggcaccattctggataatgttaagaacctcttagaatttgcagaaacactccaatttatagattctttcttaaacacttccagtaaccatgaaaactcagacttggaaatgccttctttaacttccacccccctcattggtcacaaattgactgttacaacaccatttcatagagaccagactgtgaaaactcaaaaggaaaatactgtttttagaaccccagctatcaaaaggtcaatcttagaaagctctccaagaactcctacaccattcaaacatgcacttgcagctcaagaaattaaatacggtcccctgaagatgctacctcagacaccctctcatctagtagaagatctgcaggatgtgatcaaacaggaatctgatgaatctggaattgttgctgagtttcaagaaaatggaccacccttactgaagaaaatcaaacaagaggtggaatctccaactgataaatcaggaaacttcttctgctcacaccactgggaaggggacagtctgaatacccaactgttcacgcagacctcgcctgtggcagatgcaccgaatattcttacaagctccgttttaatggcaccagcatcagaagatgaagacaatgttctcaaagcatttacagtacctaaaaacaggtccctggcgagccccttgcagccttgtagcagtacctgggaacctgcatcctgtggaaagatggaggagcagatgacatcttccagtcaagctcgtaaatacgtgaatgcattctcagcccggacgctggtcatgtgagacatttccagaaaagcattatggttttcagaacacttcaagttgacttgggatatatcattcctcaacatgaaacttttcatgaatgggagaagaacctatttttgttgtggtacaacagttgagagcagcaccaagtgcatttagttgaatgaagtcttcttggatttcacccaactaaaaggatttttaaaaataaataacagtcttacctaaattattaggtaatgaattgtagccagttgttaatatcttaatgcagatttttttaaaaaaaacataaaatgatttatctgtattttaaaggatccaacagatcagtattttttcctgtgatgggttttttgaaatttgacacattaaaaggtactccagtatttcacttttctcgatcactaaacatatgcatatatttttaaaaatcagtaaaagcattactctaagtgtagacttaataccatgtgacatttaatccagattgtaaatgctcatttatggttaatgacattgaaggtacatttattgtaccaaaccattttatgagttttctgttagcttgctttaaaaattattactgtaagaaatagttttataaaaaattatatttttattcagtaatttaattttgtaaatgccaaatgaaaaacgttttttgctgctatggtcttagcctgtagacatgctgctagtatcagaggggcagtagagcttggacagaaagaaaagaaacttggtgttaggtaattgactatgcactagtatttcagactttttaattttatatatatatacattttttttccttctgcaatacatttgaaaacttgtttgggagactctgcattttttattgtggtttttttgttattgttggtttatacaagcatgcgttgcacttcttttttgggagatgtgtgttgttgatgttctatgttttgttttgagtgtagcctgactgttttataatttgggagttctgcatttgatccgcatcccctgtggtttctaagtgtatggtctcagaactgttgcatggatcctgtgtttgcaactggggagacagaaactgtggttgatagccagtcactgccttaagaacatttgatgcaagatggccagcactgaacttttgagatatgacggtgtacttactgccttgtagcaaaataaagatgtgcccttattttacctaaaaaaaaaaaaaaaaaaaaaaaaaaaaa

SEQ ID NO: 57508 - DNA, 2326 bp, Homo Sapiens
caaccctgaatgtcatagttagctactttcaactggaagctacaacatggatttatggaatctgtcttggtttctgttcttggatgctcttctcgtgatttctggcttggcaactccagaaaactttgatgtagatggcggaatggaccaggacatatttgatatcaatgaaggtttgggactggatctttttgagggtgacatcagacttgatagggcacaaattagaaattccatcattggagaaaagtatagatggcctcataccattccatatgttctagaagatagcttggaaatgaatgctaagggagttatcctcaatgcatttgaacgttatcgccttaaaacatgtattgactttaagccttgggctggagaaacaaactatatatcagtgttcaagggcagtggctgctggtcttcagtaggaaataggcgggttgggaagcaagaactttccatcggggcaaactgtgaccgaatagcaacagttcaacacgagttcctccacgctctgggattctggcatgagcagtcgcgttctgaccgggatgactatgtcaggataatgtgggacagaattctgtcaggcagagagcacaattttaacacctatagtgacgatatatcagattccctgaatgttccctatgattacacttcagtaatgcactacagtaaaactgcattccaaaatggaacagagccgacaattgtcacaagaatctcagactttgaggatgtgatcggccaacgaatggatttcagtgactctgatctcctaaagttgaatcaactgtataactgctcctcttccttgagttttatggactcatgcagttttgaactggaaaatgtgtgtggcatgatccaaagttcaggagataatgctgactggcaacgggtttcacaggttcccagggggccagagagtgatcactccaacatgggccagtgccaaggttctggtttcttcatgcatttcgatagcagctctgtaaatgtgggggccacagcagtgctggaaagtagaacgctgtaccctaaaagaggatttcagtgcctgcaattttacttatataacagtggcagtgaaagtgatcaactgaacatctatatcagggagtattctgcagacaatgtggatggcaatttaacccttgtggaagaaataaaagaaatacccactgggagctggcaactttatcatgtaacattgaaagtgaccaagaagtttagagtggtgtttgaaggacgcaaaggctctggtgcatcactgggtggtctgtctattgatgacatcaatctttcggaaacacggtgccctcatcatatctggcatataaggaatttcacacagttcattggcagcccaaatggaactctgtatagccctccattttactcttctaaaggttatgcctttcagatttacttaaatctagcccatgtgactaatgcagggatatatttccacttgatctctggagccaatgatgatcaattacagtggccatgtccttggcaacaagccacaatgacacttttggatcaaaatcctgacattcgacagcgtatgtccaatcagcggagtataactacagacccatttatgaccaccgataatggaaactatttctgggacaggccttctaaagtgggaacagtggctttgttctctaatggaactcagtttagaagaggtgggggctatggaaccagtgcctttataacccacgaaaggctgaaaagcagagattttataaaaggagatgatgtttatatcctactgacagtggaagacatatctcacctcaactctacacaaatccagctaacaccagcccctagtgttcaagacctctgctcaaaaaccacctgtaaaaatgacggtgtctgcactgttcgagatggcaaagctgagtgcaggtgccagtcaggggaagactggtggtacatgggagaaaggtgtgaaaagagaggctccacccgagacaccatagtcattgctgtttcatctactgttgctgtgtttgccttgatgctgatcatcacccttgtcagtgtctattgcaccaggaagaaatatcgtgaaaggatgagctcaaatcgaccaaatttgactctgcaaaatcatgctttttgaagattaactcgacaatatggccagctaatgaaattaaaaaggattcttcatcatggatttcgcctaagtgatattacagccacctcattcttctaaaagtggatatttttctgtaaatagctggaaatattataaatcactattttggtcaaagtcaaaaaaaaaaaaaaaaaaaaa

SEQ ID NO: 57509 - DNA, 1923 bp, Homo Sapiens
tcccgcggcggctggcgtcgggaaagtacagtaaaaagtccgagtgcagccgccgggcgcaggatgggatccggctcctccagctaccggcccaaggccatctacctggacatcgatggacgcattcagaaggtaatcttcagcaagtactgcaactccagcgacatcatggacctgttctgcatcgccaccggcctgcctcggaacacgaccatctccctgctgaccaccgacgacgccatggtctccatcgaccccaccatgcccgcgaattcagaacgcactccgtacaaagtgagacctgtggccatcaagcaactctccgagagagaagaattaatccagagcgtgctggcgcaggttgcagagcagttctcaagagcattcaaaatcaatgaactgaaagctgaagttgcaaatcacttggctgtcctagagaaacgcgtggaattggaaggactaaaagtggtggagattgagaaatgcaagagtgacattaagaagatgagggaggagctggcggccagaagcagcaggaccaactgcccctgtaagtacagttttttggataaccacaagaagttgactcctcgacgcgatgttcccacttaccccaagtacctgctctctccagagaccatcgaggccctgcggaagccgacctttgacgtctggctttgggagcccaatgagatgctgagctgcctggagcacatgtaccacgacctcgggctggtcagggacttcagcatcaaccctgtcaccctcaggaggtggctgttctgcgtccacgacaactacagaaacaaccccttccacaacttccggcactgcttctgcgtggcccagatgatgtacagcatggtctggctctgcagtctccaggagaagttctcacaaacggatatcctgatcctaatgacagcggccatctgccacgatctggaccatcccggctacaacaacacgtaccagatcaatgcccgcacagagctggcggtccgctacaatgacatctcaccgctggagaaccaccactgcgccgtggccttccagatcctcgccgagcctgagtgcaacatcttctccaacatcccacctgatgggttcaagcagatccgacagggaatgatcacattaatcttggccactgacatggcaagacatgcagaaattatggattctttcaaagagaaaatggagaattttgactacagcaacgaggagcacatgaccctgctgaagatgattttgataaaatgctgtgatatctctaacgaggtccgtccaatggaagtcgcagagccttgggtggactgtttattagaggaatattttatgcagagcgaccgtgagaagtcagaaggccttcctgtggcaccgttcatggaccgagacaaagtgaccaaggccacagcccagattgggttcatcaagtttgtcctgatcccaatgtttgaaacagtgaccaagctcttccccatggttgaggagatcatgctgcagccactttgggaatcccgagatcgctacgaggagctgaagcggatagatgacgccatgaaagagttacagaagaagactgacagcttgacgtctggggccaccgagaagtccagagagagaagcagagatgtgaaaaacagtgaaggagactgtgcctgaggaaagcggggggcgtggctgcagttctggacgggctggccgagctgcgcgggatccttgtgcagggaagagctgccctgggcacctggcaccacaagaccatgttttctaagaaccattttgttcactgatacaaaaaaaaaaaaaggaattcatgatgctgtacagaattttatttttaaactgtcttttaaataatatattcttatacggaaaaaaaaaaaaaaaaaaaaaaaaaaaaaaaaaaaaaaaaaaaaa

SEQ ID NO: 57510 - DNA, 2974 bp, Homo Sapiens
ctcagggcagagggaggaaggacagcagaccagacagtcacagcagccttgacaaaacgttcctggaactcaagctcttctccacagaggaggacagagcagacagcagagaccatggagtctccctcggcccctccccacagatggtgcatcccctggcagaggctcctgctcacagcctcacttctaaccttctggaacccgcccaccactgccaagctcactattgaatccacgccgttcaatgtcgcagaggggaaggaggtgcttctacttgtccacaatctgccccagcatctttttggctacagctggtacaaaggtgaaagagtggatggcaaccgtcaaattataggatatgtaataggaactcaacaagctaccccagggcccgcatacagtggtcgagagataatataccccaatgcatccctgctgatccagaacatcatccagaatgacacaggattctacaccctacacgtcataaagtcagatcttgtgaatgaagaagcaactggccagttccgggtatacccggagctgcccaagccctccatctccagcaacaactccaaacccgtggaggacaaggatgctgtggccttcacctgtgaacctgagactcaggacgcaacctacctgtggtgggtaaacaatcagagcctcccggtcagtcccaggctgcagctgtccaatggcaacaggaccctcactctattcaatgtcacaagaaatgacacagcaagctacaaatgtgaaacccagaacccagtgagtgccaggcgcagtgattcagtcatcctgaatgtcctctatggcccggatgcccccaccatttcccctctaaacacatcttacagatcaggggaaaatctgaacctctcctgccacgcagcctctaacccacctgcacagtactcttggtttgtcaatgggactttccagcaatccacccaagagctctttatccccaacatcactgtgaataatagtggatcctatacgtgccaagcccataactcagacactggcctcaataggaccacagtcacgacgatcacagtctatgcagagccacccaaacccttcatcaccagcaacaactccaaccccgtggaggatgaggatgctgtagccttaacctgtgaacctgagattcagaacacaacctacctgtggtgggtaaataatcagagcctcccggtcagtcccaggctgcagctgtccaatgacaacaggaccctcactctactcagtgtcacaaggaatgatgtaggaccctatgagtgtggaatccagaacgaattaagtgttgaccacagcgacccagtcatcctgaatgtcctctatggcccagacgaccccaccatttccccctcatacacctattaccgtccaggggtgaacctcagcctctcctgccatgcagcctctaacccacctgcacagtattcttggctgattgatgggaacatccagcaacacacacaagagctctttatctccaacatcactgagaagaacagcggactctatacctgccaggccaataactcagccagtggccacagcaggactacagtcaagacaatcacagtctctgcggagctgcccaagccctccatctccagcaacaactccaaacccgtggaggacaaggatgctgtggccttcacctgtgaacctgaggctcagaacacaacctacctgtggtgggtaaatggtcagagcctcccagtcagtcccaggctgcagctgtccaatggcaacaggaccctcactctattcaatgtcacaagaaatgacgcaagagcctatgtatgtggaatccagaactcagtgagtgcaaaccgcagtgacccagtcaccctggatgtcctctatgggccggacacccccatcatttcccccccagactcgtcttacctttcgggagcgaacctcaacctctcctgccactcggcctctaacccatccccgcagtattcttggcgtatcaatgggataccgcagcaacacacacaagttctctttatcgccaaaatcacgccaaataataacgggacctatgcctgttttgtctctaacttggctactggccgcaataattccatagtcaagagcatcacagtctctgcatctggaacttctcctggtctctcagctggggccactgtcggcatcatgattggagtgctggttggggttgctctgatatagcagccctggtgtagtttcttcatttcaggaagactgacagttgttttgcttcttccttaaagcatttgcaacagctacagtctaaaattgcttctttaccaaggatatttacagaaaagactctgaccagagatcgagaccatcctagccaacatcgtgaaaccccatctctactaaaaatacaaaaatgagctgggcttggtggcgcgcacctgtagtcccagttactcgggaggctgaggcaggagaatcgcttgaacccgggaggtggagattgcagtgagcccagatcgcaccactgcactccagtctggcaacagagcaagactccatctcaaaaagaaaagaaaagaagactctgacctgtactcttgaatacaagtttctgataccactgcactgtctgagaatttccaaaactttaatgaactaactgacagcttcatgaaactgtccaccaagatcaagcagagaaaataattaatttcatgggactaaatgaactaatgaggattgctgattctttaaatgtcttgtttcccagatttcaggaaactttttttcttttaagctatccactcttacagcaatttgataaaatatacttttgtgaacaaaaattgagacatttacattttctccctatgtggtcgctccagacttgggaaactattcatgaatatttatattgtatggtaatatagttattgcacaagttcaataaaaatctgctctttgtataacagaaaaa

SEQ ID NO: 57511 - DNA, 2086 bp, Homo Sapiens
atcattcggccctcagactgggctgggcaggtctgagagttagggaaagtccgttcccactgccctcggggagagaagaaaggagggggcaagggagaagctgctggtcggactcacaatgaaaacgctccttcttttgctgctggtgctcctggagctgggagaggcccaaggatcccttcacagggtgcccctcaggaggcatccgtccctcaagaagaagctgcgggcacggagccagctctctgagttctggaaatcccataatttggacatgatccagttcaccgagtcctgctcaatggaccagagtgccaaggaacccctcatcaactacttggatatggaatacttcggcactatctccattggctccccaccacagaacttcactgtcatcttcgacactggctcctccaacctctgggtcccctctgtgtactgcactagcccagcctgcaagacgcacagcaggttccagccttcccagtccagcacatacagccagccaggtcaatctttctccattcagtatggaaccgggagcttgtccgggatcattggagccgaccaagtctctgtggaaggactaaccgtggttggccagcagtttggagaaagtgtcacagagccaggccagacctttgtggatgcagagtttgatggaattctgggcctgggatacccctccttggctgtgggaggagtgactccagtatttgacaacatgatggctcagaacctggtggacttgccgatgttttctgtctacatgagcagtaacccagaaggtggtgcggggagcgagctgatttttggaggctacgaccactcccatttctctgggagcctgaattgggtcccagtcaccaagcaagcttactggcagattgcactggataatatgctgtggagtgtgccaaccttaacgtcatgccggatgtcaccttcaccattaacggagtcccctataccctcagcccaactgcctacaccctactggacttcgtggatggaatgcagttctgcagcagtggctttcaaggacttgacatccaccctccagctgggcccctctggatcctgggggatgtcttcattcgacagttttactcagtctttgaccgtgggaataaccgtgtgggactggccccagcagtcccctaaggaggggccttgtgtctgtgcctgcctgtctgacagaccttgaatatgttaggctggggcattctttacacctacaaaaagttattttccagagaatgtagctgtttccagggttgcaacttgaattaagaccaaacagaacatgagaatacacacacacacacacatatacacacacacacacttcacacatacacaccactcccaccaccgtcatgatggaggaattacgttatacattcatattttgtattgatttttgattatgaaaatcaaaaattttcacatttgattatgaaaatctccaaacatatgcacaagcagagatcatggtataataaatccctttgcaactccactcagccctgacaacccatccacacacggccaggcctgtttatctacactgctgcccactcctctctccagctccacatgctgtacctggatcattctgaagcaaattccgagcattacatcattttgtccataaatatttctaacatccttaaatatacaatcggaattcaagcatctcccattgtcccacaaatgtttggctgtttttgtagttggattgtttgtattaggattcaagcaaggcccatatattgcatttatttgaaatgtctgtaagtctctttccatctacagagtttagcacatttgaacgttgctggttgaaatcccgaggtgtcatttgacatggttctctgaacttatctttcctataaaatggtagttagatctggaggtctgattttgtggcaaaaatacttcctaggtggtgctgggtacttcttgttgcatcctgtcaggaggcagataatgctggtgcctctctattggtaatgttaagactgctgggtgggtttggagttcttggctttaatcattcattacaaagttcagcatttta

SEQ ID NO: 57512 - DNA, 1784 bp, Homo Sapiens
aacaccctcctggaggatgctggtgagaggcagggaccaggggtccggctcccggctcgggcctatcgttaggcgctgggcccccaggccctctcctttgcagagtctcgctgcctccctcgacgcagagccttcaagcgccgcagtccccgacggcttccccgcgggccccactgtctccccaagacgcctggcgaggccgccggggctggaggaggcgctgagcgcgctggggctgcagggagaacgcgagtacgccggggacatcttcgccgaagtcatggagtacctgggtctggctggtgacacactttatctggcggttcacctgcttgattcctacctgagcgctggccgcgtgcgtctacatcgcctgcagctgctgggcgtggcttgcctgtttgtggcgtgcaaaatggaagagtgcgtgcttcccgaggaaactgaggtccggaacttggggcctttccagggcagggagtaaagagcccggatccaagactccttcacctccccccgcatcccccatctgcagcccgccttcctctgcctcctgagcgcggactccttctcacgggcggagctgctgcgcgccgagcgtcgcatcctgagccgcctggatttccggctgcaccaccccggcccgctgctgtgcctcgggctgctggccgcgctggcagggagcagcccccaggtgatgttacttgccacctacttcctggagctgtctttgctggaggccgaggcggcgggatgggagccgggtcgtcgtgcggctgcggctctgagcctggcgcaccgcttgctcgacggggcgggctccaggctccagccagaactttacaggtgtagtcttggcggaggaagtgtatggggtcaccgcagcttcagggacttaccttcctggtcatttttacggtctcggagaatgagagacaattattgaggaggaggtggcacctagacttgatttttctgggtgtgggagagaatggggtgggaggacccccattagtccagatctggggtctcttaaccttgccccagagtggaagatagtctcccaggcccagaagatgctcctattgccttccagggctgagaacgaaggatcacccaggcctcgagtcctccatctctgtatctggtggtggatggggtgttcctttagctgctagggccgctaaccatgctaccaggtggcagggcgaaccatggtttccctcagcctgtgcacccagcatagagaggatggctgcccatcctcagctcccctccttgcttcctcgagtgttctgactccgcactagccgcgccctgtaggaagaatagggtgtccacctctccccggtgctcgcctagtcactccagttgaagacgggacgcgtgcccgatctcaagagagcccccgacccgtccgtggggaaccacatcgacgcttcttctcagcctccagtctccagttccaaggatgggtcatctccaaccacttgccctgcctcagtttctccatctccctgctgcagccccgaggaactgggcaccctcgagccgtgcatggcccgcgctgcgctccgaggtcccgcgccgggtcgcgccgcagtcttcctcaagtatgcgcggccccagcgccagggggccagccttgccgccgcctgcctgctccgccgcctccagtctgagcctccctgagtactgggactcagtcacaaaaaaatcaacaacaaaaaacaaaaccctcccagtgtgtgtccgtctctcatctcaataaaagaatttatttt

SEQ ID NO: 57513 - DNA, 3804 bp, Homo Sapiens
taaagtcatcaaaacaacgttatatcctgtgtgaaatgctgcagtcaggatgccttgtggtttgagtgccttgatcatgtgccctaaggggatggtggcggtggtggtggccgtggatgacggagactctcaggccttggcaggtgcgtctttcagttcccctcacacttcgggttcctcggggaggaggggctggaaccctagcccatcgtcaggacaaagatgctcaggctgctcttggctctcaacttattcccttcaattcaagtaacaggaaacaagattttggtgaagcagtcgcccatgcttgtagcgtacgacaatgcggtcaaccttagctgcaagtattcctacaatctcttctcaagggagttccgggcatcccttcacaaaggactggatagtgctgtggaagtctgtgttgtatatgggaattactcccagcagcttcaggtttactcaaaaacggggttcaactgtgatgggaaattgggcaatgaatcagtgacattctacctccagaatttgtatgttaaccaaacagatatttacttctgcaaaattgaagttatgtatcctcctccttacctagacaatgagaagagcaatggaaccattatccatgtgaaagggaaacacctttgtccaagtcccctatttcccggaccttctaagcccttttgggtgctggtggtggttggtggagtcctggcttgctatagcttgctagtaacagtggcctttattattttctgggtgaggagtaagaggagcaggctcctgcacagtgactacatgaacatgactccccgccgccccgggcccacccgcaagcattaccagccctatgccccaccacgcgacttcgcagcctatcgctcctgacacggacgcctatccagaagccagccggctggcagcccccatctgctcaatatcactgctctggataggaaatgaccgccatctccagccggccacctcaggcccctgttgggccaccaatgccaatttttctcgagtgactagaccaaatatcaagatcattttgagactctgaaatgaagtaaaagagatttcctgtgacaggccaagtcttacagtgccatggcccacattccaacttaccatgtacttagtgacttgactgagaagttagggtagaaaacaaaaagggagtggattctgggagcctcttccctttctcactcacctgcacatctcagtcaagcaaagtgtggtatccacagacattttagttgcagaagaaaggctaggaaatcattccttttggttaaatgggtgtttaatcttttggttagtgggttaaacggggtaagttagagtagggggagggataggaagacatatttaaaaaccattaaaacactgtctcccactcatgaaatgagccacgtagttcctatttaatgctgttttcctttagtttagaaatacatagacattgtcttttatgaattctgatcatatttagtcattttgaccaaatgagggatttggtcaaatgagggattccctcaaagcaatatcaggtaaaccaagttgctttcctcactccctgtcatgagacttcagtgttaatgttcacaatatactttcgaaagaataaaatagttctcctacatgaagaaagaatatgtcaggaaataaggtcactttatgtcaaaattatttgagtactatgggacctggcgcagtggctcatgcttgtaatcccagcactttgggaggccgaggtgggcagatcacttgagatcaggaccagcctggtcaagatggtgaaactccgtctgtactaaaaatacaaaatttagcttggcctggtggcaggcacctgtaatcccagctgcccaggaggctgaggcatgagaatcgcttgaacctggcaggcggaggttgcagtgagccgagatagtgccacagctctccagcctgggcgacagagtgagactccatctcaaacaacaacaacaacaacaacaacaacaacaaaccacaaaattatttgagtactgtgaaggattatttgtctaacagttcattccaatcagaccaggtaggagctttcctgtttcatatgtttcagggttgcacagttggtctctttaatgtcggtgtggagatccaaagtgggttgtggaaagagcgtccataggagaagtgagaatactgtgaaaagggatgttagcattcattagagtatgaggatgagtcccaagaaggttctttggaaggaggacgaatagaatggagtaatgaaattcttgccatgtgctgaggagatagccagcattaggtgacaatcttccagaagtggtcaggcagaaggtgccctggtgagagctcctttacagggactttatgtggtttagggctcagagctccaaaactctgggctcagctgctcctgtaccttggaggtccattcacatgggaaagtattttggaatgtgtcttttgaagagagcatcagagttcttaagggactgggtaaggcctgaccctgaaatgaccatggatatttttctacctacagtttgagtcaactagaatatgcctggggaccttgaagaatgcccttcagtggccctcaccatttgttcatgcttcagttaattcaggtgttgaaggagcttaggttttagaggcacgtagacttggttcaagtctcgttagtagttgaatagcctcaggcaagtcactgcccacctaagatgatggttcttcaactataaatggagataatggttacaaatgtctcttcctatagtataatctccataagggcatggcccaagtctgtctttgactctgcctatccctgacgtttagtagcatgcccgacatacaatgttagctattggtattattgccatatagataaattatgtataaaaattaaactgggcaatagcctaagaaggggggaatattgtaacacaaatttaaacccactacgcagggatgaggtgctataatatgaggaccttttaacttccatcattttcctgtttcttgaaatagtttatcttgtaatgaaatataaggcacctcccacttttatgtatagaaagaggtcttttaatttttttttaatgtgagaaggaagggaggagtaggaatcttgagattccatatcgaaaatactgtactttggttgatttttaagtgggcttccattccatggatttaatcagtcccaagaagatcaaactcagcagtacttgggtgctgaagaactgttggatttaccctggcacgtgtgccacttgcccagcttcttgggcacacagagttcttcaatccaagttatcagattgtatttgaaaatgacagagctggagagttttttgaaatggcagtggcaaataaataaatacttttttttaaatggaaagacttgatctatggtaataaatgattttgttttctgactggaaaaataggcctactaaagatgaatcacacttgagatgtttcttactcactctgcacagaaacaaagaagaaatgttatacagggaagtccgttttcactattagtatgaaccaagaaatggttcaaaaacagtggtaggagcaatgctttcatagtttcagatatggtagttatgaagaaaacaatgtcatttgctgctattattgtaagagtcttataattaatggtactcctataatttttgattgtgagctcacctatttgggttaagcatgccaatttaaagagaccaagtgtatgtacattatgttctacatattcagtgataaaattactaaactact

SEQ ID NO: 57514 - DNA, 2021 bp, Homo Sapiens
agccatatgggggatacgccagcaacagacgccggccgccaagatctgcatccctaggccacgctaagaccctggggaagagcgcaggagcccgggagaagggctggaaggaggggactggacgtgcggagaattcccccctaaaaggcagaagcccccgcccccaccctcgagctccgctcgggcagagcgcctgcctgcctgccgctgctgcgggcgcccacctcgcccagccatgccaggcccggccaccgacgcggggaagatccctttctgcgacgccaaggaagaaatccgtgccgggctcgaaagctctgagggcggcggcggcccggagaggccaggcgcgcgcgggcagcggcagaacatcgtctggaggaatgtcgtcctgatgagcttgctccacttgggggccgtgtactccctggtgctcatccccaaagccaagccactcactctgctctgggcctacttctgcctcctcctggccgctctgggtgtgacagctggtgcccatcgcttgtggagccacaggtcctaccgggccaagctgcctctgaggatatttctggctgtcgccaactccatggctttccagaatgacatcttcgagcggtccagggaccaccgagcccaccacaagtactcagagacggatgctgacccccacaatgcccgccggggcttcttcttctcccatattgggtggctgtttgttcgcaagcatcgagatgttattgagaaggggagaaagcttgacgtcactgacctgcttgctgatcctgtggtccggatccagagaaatacacagcacatccagaaagaaggaagagctctcaatcaagaggcagcgtgtgagatgcttcgtgagtggcatcaagggcatatattgaaagtcacccttcccggattacacattttagctttgttacatactcattgtaaccactccgaaaagtgctgcttgatgctgcgtgctctttctgtgtccctggaggtattctgaaggtcagaagagagatatacaacagcgaggcttggtgataacgtatagaataacagacggggactccacacccaggccttttttaacggtgtgaagcatagacagagctgcagtctgtgctaacattaggttatttattgattcaatcagttgacacaaggaggcagctacggggaggtaaaatatggtcctaaaatcaaaaagatttcagttttgtcattctgtctctgagattctatttccacatctagagcagggtaataatgatacctaccttacaaaattattgggagaatacattagttaatatatgtgaaagtatggaggagatgtgcaataaatatttgtgttattaactacacatacagcactctataggagatattccatttataaaaactttaggttctaaaaacctgtacacgttgattatttttgtaagtcaaaagtgattaagaggagtttaagctatcatttccagatgtatttctataaataaaaacataagtatattcagttgatttggggtggagagttccatagatgtctgttaggtccgcttggtccagagctgagttcaagtcctgaatatccttgttaattttctgtcttgttgatctgtctaatattgacagtggggtattaaagtctcccactattattatatgggagtctaagtctccttgtaggtctctaagaacttgctttatgaatctgggtgctcctgtattaggtgcatacatatttaggatagttagctcttcttgctgcattgatcccattaccattatataatgcccttctttgtcttttttgatctttgttggtttaaagtctgttttattagagactaggattgcaacccctgctatttttttttttttttttgcttgataaatattcctgtatccctttattttgagcctatatgtgtctttgcacgtgaggtgggtctcctgaatacagcacaccgatgggttttgactctaaaaaaaaaaaaaaaaaaaaaaaaaaa

SEQ ID NO: 57515 - DNA, 6245 bp, Homo Sapiens; identical to SEQ ID NO: 23975

SEQ ID NO: 57516 - DNA, 2678 bp, Homo Sapiens
ggcctcgagcgccccggcgggaggtttttctatatgagtggagaagacagctgttaccagggaggtcatacaacatttttttaggatgtctgaagatgaagaaaaagtgaaattacgccgtcttgaaccagctatccagaaattcattaagatagtaatcccaacaaacctggaaaggttaagaaagcaccagataaatattgagaagtatcaaaggtgcagaatctgggacaagttgcatgaagagcatatcaatgcaggacgtacagttcagcaactccgatccaatatccgagaaattgagaaactttgtttgaaagtccgaaaggatgacctagtacttctgaagagaatgatagatcctgttaaagaagaagcatcagcagcaacagcagaatttctccaactccatttggaatctgtagaagaacttaagaagcaatttaatgatgaagaaactttgctacagcctcctttgaccagatccatgactgttggtggagcatttcatactactgaagctgaagctagttctcagagtttgactcagatatatgccttacctgaaattcctcaagatcaaaatgctgcagaatcgcgggaaaccttagaagcggacttaattgaacttagccaactggtcactgacttctctctcctagtgaactctcagcaggagaagattgacagcattgcagaccatgtcaacagtgctgctgtgaatgttgaagagggaaccaaaaacttagggaaggctgcaaaatacaagctggcagctctgcctgtggcaggtgcactcatcgggggaatggtagggggtcctattggcctccttgcatgcttcaaagtggcaggaattgcagctgcacttggtggtggggtgttgggcttcacaggtggaaaattgatacaaagaaagaaacagaaaatgatggagaagctcacttccagctgtccagatcttcccagccaaactgacaagaaatgcagttaaaaaccaaatttcagtattattggtgccaacatgtctatcctgaggacctttgctgctgttggacactccgtcaccttttggaacacaagtatatcaagatagtggctactgatgttcaagtgggattgaagtgtgataaatggatatattttgttgtttgctggggtgttcatggagatgttaagagattgaggccctgggctgagggtatataatgtatgtcaggtaaagtttgaagactgccaaggagcagattttctccctggaaatgtgaaaactgaacctataactctgataaggacttgagatgtgtagaaacgttgggttatggaagactagtttcttccataaccctgaattggagaccttaatgctaagtgtagattattgaggtttgttagtgaggaaaagaataagagttcagaagcctttgttatcagatagcgaaatcagggcctagtgaggagcacaggtcgactacataatggagtccattggcgaaccctattgcaatttggtccaactatatcttctggtgaaggaaattaatgatgtaagaaaatgcaagaggctcaacttctcttccaaaaatcttctggcttctgaactcttcctctgcctctctttaaataaataacacagaatttcaagtggtaggagacttattaagccagtcaccaagcttggtctgtcagcctgtcttctaacacctcaaagatcttgtgccctgtgctgtccctcccttgtaattatgaaaagttctttggtttctggggtgaactctacccatgtataatgaggaattctctcataaccttttttgtcttgtctgtcatctctgttcatcccctcctataacctctaggtaaaaagaaaagaaaaaaagaaatttcgagatattttcaacattgttagagtttgggctaaaatgagcaaggagaaaaaaaccaccaagaacatttcctggggcatgttccagttttgaggggtgatatatctgccagatagggggtatctgacccagtcttcttttcagctggtctctggggggagctgagaactcgcttgctacctcacatccttttccccagactttttatctcctatgcatccctttgctttctatagctggtgtttcttccccaaaatggcgttcccatgcttacctttctcacattctagacaatgatggacaaagacgcatgcaagactcagacccggggaatggtgtggtgctaatctcaacacctgacattcacagcaagcatggcccagcccaaccgcatgtctatctcaaaccgcagaaaggctttaatactggaaaaaaagaattcaagactacaggcagctcccctctgtaccccaactcatttaaaataggaggaatcactttttgccttacttaacgcttttttctgagcacagggatgggcacctgcaccccagaaggtgtgagctgtctctctgccaggagctaaggttcattaggggattggatggtttatcacttctttctttctgagtttacttttagtaacttttattgatggctacctttcatgtccctgtctaaagagactttctctttcatacgtcttaaatctcatcaatgaaatccagtgaaacagcaccatttcttagtatcattaaataactagaaagtatcaaaaaaaaaaaaaaaaaa

SEQ ID NO: 57517 - DNA, 3218 bp, Homo Sapiens
gaacaaaccaacatttgagccaggaataactagagaggaacaatggggttattcagaggttttgttttcctcttagttctgtgcctgctgcaccagtcaaatacttccttcattaagctgaataataatggctttgaagatattgtcattgttatagatcctagtgtgccagaagatgaaaaaataattgaacaaatagaggatatggtgactacagcttctacgtacctgtttgaagccacagaaaaaagattttttttcaaaaatgtatctatattaattcctgagaattggaaggaaaatcctcagtacaaaaggccaaaacatgaaaaccataaacatgctgatgttatagttgcaccacctacactcccaggtagagatgaaccatacaccaagcagttcacagaatgtggagagaaaggcgaatacattcacttcacccctgaccttctacttggaaaaaaacaaaatgaatatggaccaccaggcaaactgtttgtccatgagtgggctcacctccggtggggagtgtttgatgagtacaatgaagatcagcctttctaccgtgctaagtcaaaaaaaatcgaagcaacaaggtgttccgcaggtatctctggtagaaatagagtttataagtgtcaaggaggcagctgtcttagtagagcatgcagaattgattctacaacaaaactgtatggaaaagattgtcaattctttcctgataaagtacaaacagaaaaagcatccataatgtttatgcaaagtattgattctgttgttgaattttgtaacgaaaaaacccataatcaagaagctccaagcctacaaaacataaagtgcaattttagaagtacatgggaggtgattagcaattctgaggattttaaaaacaccatacccatggtgacaccacctcctccacctgtcttctcattgctgaagatccgtcaaagaattgtgtgcttagttcttgataagtctggaagcatggggggtaaggaccgcctaaatcgaatgaatcaagcagcaaaacatttcctgctgcagactgttgaaaatggatcctgggtggggatggttcactttgatagtactgccactattgtaaataagctaatccaaataaaaagcagtgatgaaagaaacacactcatggcaggattacctacatatcctctgggaggaacttccatctgctctggaattaaatatgcatttcaggtgattggagagctacattcccaactcgatggatccgaagtactgctgctgactgatggggaggataacactgcaagttcttgtattgatgaagtgaaacaaagtggggccattgttcattttattgctttgggaagagctgctgatgaagcagtaatagagatgagcaagataacaggaggaagtcatttttatgtttcagatgaagctcagaacaatggcctcattgatgcttttggggctcttacatcaggaaatactgatctctcccagaagtcccttcagctcgaaagtaagggattaacactgaatagtaatgcctggatgaacgacactgtcataattgatagtacagtgggaaaggacacgttctttctcatcacatggaacagtctgcctcccagtatttctctctgggatcccagtggaacaataatggaaaatttcacagtggatgcaacttccaaaatggcctatctcagtattccaggaactgcaaaggtgggcacttgggcatacaatcttcaagccaaagcgaacccagaaacattaactattacagtaacttctcgagcagcaaattcttctgtgcctccaatcacagtgaatgctaaaatgaataaggacgtaaacagtttccccagcccaatgattgtttacgcagaaattctacaaggatatgtacctgttcttggagccaatgtgactgctttcattgaatcacagaatggacatacagaagttttggaacttttggataatggtgcaggcgctgattctttcaagaatgatggagtctactccaggtattttacagcatatacagaaaatggcagatatagcttaaaagttcgggctcatggaggagcaaacactgccaggctaaaattacggcctccactgaatagagccgcgtacataccaggctgggtagtgaacggggaaattgaagcaaacccgccaagacctgaaattgatgaggatactcagaccaccttggaggatttcagccgaacagcatccggaggtgcatttgtggtatcacaagtcccaagccttcccttgcctgaccaatacccaccaagtcaaatcacagaccttgatgccacagttcatgaggataagattattcttacatggacagcaccaggagataattttgatgttggaaaagttcaacgttatatcataagaataagtgcaagtattcttgatctaagagacagttttgatgatgctcttcaagtaaatactactgatctgtcaccaaaggaggccaactccaaggaaagctttgcatttaaaccagaaaatatctcagaagaaaatgcaacccacatatttattgccattaaaagtatagataaaagcaatttgacatcaaaagtatccaacattgcacaagtaactttgtttatccctcaagcaaatcctgatgacattgatcctactcctactcctactcctactcctgataaaagtcataattctggagttaatatttctacgctggtattgtctgtgattgggtctgttgtaattgttaactttattttaagtaccaccatttgaaccttaacgaagaaaaaaatcttcaagtagacctagaagagagttttaaaaaacaaaacaatgtaagtaaaggatatttctgaatcttaaaattcatcccatgtgtgatcataaactcataaaaataattttaagatgtcggaaaaggatactttgattaaataaaaacactcatggatatgtaaaaactgtcaagattaaaatttaatagtttcatttatttgttattttatttgtaagaaatagtgatgaacaaagatcctttttcatactgatacctggttgtatattatttgatgcaacagttttctgaaatgatatttcaaattgcatcaagaaattaaaatcatctatctgagtagtcaaaatacaagtaaaggagagcaaataaacaacatttggaaaaaaaaaaaaaaaaaaaa

SEQ ID NO: 57518 - DNA, 5536 bp, Homo Sapiens; identical to SEQ ID NO: 29191

SEQ ID NO: 57519 - DNA, 2086 bp, Homo Sapiens
acagatgagtaacgtgaatttgtccgtctccgacttctggagatttattttttttagatgaggtgttgctgtgttgcccaagctggacttgaacccctaggctcaagcaatccttccacctcagtctcccaagtagcagggactacagagtgatgatgcgggtgtgctggttggtgagacaggacagccggcaccagcgaatcagacttccacatttggaagcagttgtgattgggcgtggcccagagaccaagatcactgataagaaatgttctcgacagcaagtacagttgaaagcagagtgtaacaagggatatgtcaaggtaaagcaggtaggagtcaatcccaccagcattgactcagtcgtaattgggaaggaccaagaggtgaagctgcagcctggccaggttctccacatggtgaatgaactttatccatatattgtagagtttgaggaagaggcaaagaaccctggcctggaaacacacaggaagagaaagagatcaggcaacagtgattctatagaaagggatgctgctcaggaagctgaggctgggacagggctggaacctgggagcaactctggccaatgctctgtgcccctaaagaagggaaaagatgcacctatcaaaaaggaatccctgggccactggagtcaaggcttgaagatttctatgcaggaccccaaaatgcaggtttacaaagatgagcaggtggtggtgataaaggataaatacccaaaggcccgttaccattggctggtcttaccgtggacctccatttccagtctgaaggctgtggccagggaacaccttgaactccttaagcatatgcacactgtgggggaaaaggtgattgtagattttgctgggtccagcaaactccgcttccgattgggctaccacgccattccgagtatgagccatgtacatcttcatgtgatcagccaggattttgattctccttgccttaaaaacaaaaaacattggaattctttcaatacagaatacttcctagaatcacaagctgtgatcgagatggtacaagaggctggtagagtaactgtccgagatgggatgcctgagctcttgaagctgccccttcgttgtcatgagtgccagcagctgctgccttccattcctcagctgaaagaacatctcaggaagcactggacacagtgattctgcagagcctgagctgctgctgtggtgtggcccactggagcaaactgctggcacctattctgggttgcttgtgaacttctactcatttcctaaattaaaacatgcagctttttcacaaatttattctattattgagtggccacaatgtagagtggctcaaagtacttcaggattaggaatttgggtttgtcatagatgtattctctggtgagggtggctgggatatacctgacccaccatcttcagaaggacccatgtcaggtctgaccattgggagcaaagccatgttcacactgacctaatgcagagtatggaagcattgggctggttatacatttctgtttcttagatttatcctccgcctctgtaggcatggacaacctttaatcagagcatctagagtggcctcttgtttatcctgaagatactgatgggtcttgttttctgttagtctgttttgtaatattcttttcccttccttcatggggaggcttagtttgtccagtccttccatgcccttctatcccagattacctaaatgttcccttctcaggaattctgtctcatcagttcttcacagtgagaaaagaggctagatgatggtgtggggggttggagttttcttctaataccgagggttcctggctgtgaggaaacagccacatgttcgtcatgattgagctgtgaagtcttcttggacctgttgtctgaaaataaagttaatttgtttgaggcatctctcttaagtaggtggaaactattgaagttcagctaacaatcacagcataggttctgatgcatggaaaggtggttggtgaatgaaaaagttgcgtagagccactactttctttttccctgagaataaatttggataaaacagttgtaaaaaaaaaaaaaaaaaa

SEQ ID NO: 57520 - DNA, 3846 bp, Homo Sapiens
ctctcccttctccactctctccccctgtctcctttcttcttcttctttcaccctccgtctctcacaccccctccattcccctgtctcctttctgacactgcactgcagctgctcctcagccctgccccctccccagtgagaacaaaccagcaacattgctttttttcctaaagagatttatattgatccgattaaaaaaaaaaaaccttaagaaaccccaaacgcaaaaaaaaaaaaaaaaaaaaaagaaaaaagaaaagaaaaagccaaaacaaaagggagaaccttctcccggtagcagcggcaggaactgcaaacatgatggcggcagctcccatccagcagaacgggacccacactggggttcccatagacctggacccgccggactcgcggaaaaggccgctggaagccccccctgaagccggcagcaccaagaggaccaatacgggcgaagacggccagtattttctaaaggttctcatacctagttatgctgctggatctataattgggaagggaggacagacaattgttcagttgcaaaaagaaactggagccaccatcaagctgtctaagtccaaagatttttacccaggtactactgagcgagtgtgcttgatccagggaacggttgaagcactgaatgcagttcatggattcattgcagaaaaaattcgagaaatgccccaaaatgtggccaagacagaaccagtcagcattctacaaccccagaccaccgttaatccagatcgcatcaaacaagtaaagattatagttcccaacagcacagcaggtctgataatagggaagggaggtgctactgtgaaggctgtaatggagcagtcaggggcttgggtgcagctttcccagaaacctgatgggatcaacttgcaagagagggttgtcactgtgagtggagaacctgaacaaaaccgaaaagctgttgaacttatcatccagaagatacaagaggatccacaaagtggcagctgtctcaatatcagttatgccaatgtgacaggtccagtggcaaattccaatccaaccggatctccttatgcaaacactgctgaagtgttaccaactgctgcagcagctgcagggctattaggacatgctaaccttgctggcgttgcagcctttccagcagttttatctggcttcacaggcaatgacctggtggccatcacctctgcacttaatacattagccagctatggatataatctcaacactttaggtttaggtctcagtcaagcagcagcaacaggggctttggctgcagcagctgccagtgccaacccagcagcagcagcagccaatttattggccacctatgccagtgaagcctcagccagtggcagcacagctggtggtacggcggggacatttgcattaggtagcctggctgctgctactgctgcaaccaatggatattttggagctgcttctcccctagctgccagtgccattctaggaacagaaaagtccacagatggatccaaggatgtagttgaaatagcagtgccagaaaacttagttggtgcaatacttggcaaaggagggaaaacattagtggaataccaggagttgactggtgcaaggatacagatctccaaaaaaggagaattcgtacctggcacaaggaatcggaaggtaaccattactggaacaccagctgcaacacaggctgctcaatatttaattacacaaaggatcacatatgagcaaggagttcgggctgccaatcctcagaaagtgggttgagtgccccagttacacatcagattgttttaacccctcctttaccccattttcaagaaggatgtactgtactttgcagaagtgaagtttttctgttattaatatataattatgcaaatgaatgcgactatgttgacaatgtgtatatgtaaataatatgtgttttaccagatgtttcatagaaagaattttttcttgatctgttttgttctctatactttgcttgtgtatatttgtcagaggtgtttctagtgtaagatttaagcctgccattttaccagcattattgtagtttaatgattgaatgtagacagggatatgcgtatagttttcagtattagttctagataacactaaattaactactgttaggttgagtatggtggggtcagtgacctaaaatggagtgaggccaaagcactgtcctgtaagtcttacttcctgcttagggcacagtgaagtaggaaacaatattttgaaaataagttttaaatttaaaatgatcaaaaagcaatatagttgcataaaagcactgtaaaatatttaaaaggttaaaactgtggaaaattatattggtaagtttacagatcaataaaagcacctgttctccatctgaactagacaatggaaataatgctgcatgctggccatggcccattcttcatcatttgtaagttcaacaaaagttctcacatggagtcccacctcttcagaggtttgtacatttgtttttaagcactgaattcactactgatcccatcgcctggccagtagaacagtcattactccattaacatcctcactgtttagacacataactgtggtacagtgtattggaaattttataaacaaaagtgaaagtgccaacaaattattgatagctgataatgtttcattatctgcaactgcttgataagtatgttgcattttaagagcttataattgtgtataatttgttaacactagaaacctattagtattgtgaatgtagattttactgtgaagctatctgtgatttagctgtttgctcccatgatggagtctttgcagcatggcgctagcagccaatgcagtttctaatactcggtaatttgcatgttttgtggagcatttttatgtcaccaaccagacagtatttcctgcatgcttatttagaagaggcagcttatcttgagaggtagtgttatctacctttgtcaggctttttgacaggtcatttcagagtaagcctttgttcccaagacccaacaactgtcaccctcttctgtacctctcctgagtgccaactgtccaggccatttgacacaccatctgttaacctctgagtttgcccactcaaggccactcataggggcatccatccccaagcacctcctcatgctgtgcatgcagtcttaaattcaatggacaaaaataaaatgctggctacctctggatcatctggctgagcaactgaattacaaaagagaattacttccatctcaacttcaacccattgattacgtccatcctagcaagctaaatggcatcccagctgctcctttctgtgcaaccaattaaagaacaatgagtgtgatgctccatgtctgaatttcgtccagcctctctctgaactgtgatctttgtcctcatgaactttcccttttgttcattgaactatatggactcttcatttcatattgatttactgtgcaatttacttttggacattgagaacttgaaattatttcctgatcccttccccttccactattaataattcatttctgtcaaactgtaagagtagactcatttttttttttttagtttttaacattggactgttatttcatttagagttctctatctctaaatatttatttagagaatgattttaaaagggaatgatatgcttgtttaaatgaaagagaaaagctgtagtaaactgtgttaattggtaatgactatttatcgtcgatactctgtagctgtgtaagttttgacaaatagtgtatctcgtggaatcagtggttagcattgccgctattatatttactcattttatcattataaatgtgcttagttcatcatgtagcatca

SEQ ID NO: 57521 - DNA, 1020 bp, Homo Sapiens; identical to SEQ ID NO: 29406

SEQ ID NO: 57522 - DNA, 1758 bp, Homo Sapiens
cacgagcggcacgaggatttccagctcagcgatgcccccaggtccctgggagagctgcttctgggtggggggcctcattttgtggctcagcgttggaagttcaggggatgcacctcctaccccacagccaaagtgcgctgacttccagagcgccaacctttttgaaggcaccgatctcaaagtccagtttctcctctttgtcccttcgaatcctagctgtgggcagctagtagaaggaagcagtgacctccaaaactctgggttcaatgccactctgggaaccaaactaattatccatggattcagggttttaggaacaaagccttcctggattgacacatttattagaacccttctgcgtgcaacgaatgctaatgtgattgccgtggactggatttatgggtctacaggagtctacttctcagctgtgaaaaatgtgattaagttgagcctcgagatctcccttttcctcaataaactcctggtgctgggtgtgtcggaatcctcaatccacatcattggtgttagcctgggggcccacgttgggggcatggtgggacagctcttcggaggccagctgggacagatcacaggcctggaccccgctggacctgagtacaccagggccagtgtggaagagcgcttggatgctggagatgccctcttcgtggaagccatccacacagacaccgacaatttgggtattcggattcccgttggacatgtggactacttcgtcaacggaggccaagaccaacctggctgccccaccttcttttacgcaggttatagttatctgatctgtgatcacatgagggctgtgcacctctacatcagcgccctggagaattcctgtccactgatggcctttccctgtgccagctacaaggccttccttgctggacgctgtctggattgctttaacccttttctgctttcctgcccaaggataggactggtggaacaaggtggtgtcaagatagagccgctccccaaggaagtgaaagtctacctcctgactacttccagtgctccgtactgcatgcatcacagcctcgtggagtttcacttgaaggaactgagaaacaaggacaccaacatcgaggttaccttccttagcagtaacatcacctcttcatctaagatcaccatacctaagcagcaacgctatgggaaaggaatcatagcccatgccaccccacaatgccagataaaccaagtgaaattcaagtttcagtcttccaaccgagtttggaaaaaagaccggactaccattattgggaagttctgcactgcccttttgcctgtcaatgacagagaaaagatggtctgcttacctgaaccagtgaacttacaagcaagtgtgactgtttcctgtgacctgaagatagcctgtgtgtagtttaacctgggcaggacacatctccctgcattttttttttttttttttgagagagaggtgtgatgagggatgtgtgtgtgcagcttattgtagaccattactactaaggagaaaagcaaagctctttcttattttcctcataatcagctaccctggaggggagggagaactcattttacagaacttggtttcctttgccgatcttatgtacatacccattttagctttcccatgcatacttaactgcacttgctttatctccttgggcattcgtacttaggattcaatagaaacatgtacagggtaaacaattttttaaaaataaaacttcatggagtaaaaaaaaaaaaaaaaaa

SEQ ID NO: 57523 - DNA, 1685 bp, Homo Sapiens
agttcagggccggacagcgagcggcggcgacttgccagtaagggtttggagtcatcagcaggtttaattttggaggaactttacaggtttggctccagcagctgctgttgccaccaccactagttcaagcaccatgcagtttacctcaatatcaaattctttgacctccactgctgctattgggctctcatttacaacttcaacgactaccaccgccactttcaccaccaacactactaccacaatcaccagtggctttactgtgaaccaaaaccaactgttatcaagagggtttgaaaaccttgtaccttatacttcaactgttagtgtagtagcaactcctgtgatgacatatggtcatctggagggtcttataaatgagtggaaccttgagctggaagatcaagagaagtactttcttctccaggccactcaggtcaatgcttgggaccatacattgattgagaatggtgagatgattcgtattttacatggagaagtgaacaaagtgaaactggatcagaaaagattggaacaagaattggattttatcctgtcacagcagcaggaactagaatttctgttgacttatttagaggagtctacgcgcgaccagagtggacttcattatctgcaggatgcagatgaggagcatgtggagacctccaccagatctgcagaattctgaatgcccatatggactccctgcagtggattgatcggaattcaggcatgctgcgaaggaaggtagaagtggtaacacgggttttcgaggattatcgtcacgaggagcatgcacacaatgtcaacactgctttttagtgaatgaccatatcttcagcatgtcgtttctggattattacctacaaattctgatgttaaatagagtagtatttatacttaatatttcatcttgatcataatgaattgtgcatcctttttttcatttaagtattgtactgttgagaattataccttagttttgtttttagtattagaaaatcaaaattatactagcccctttgtccagacagcaacctcttagatgctgactctatatgtgtaatttatgtcttactctccctggcatcagtacacatcatcctcctcactccagttgaatcatagggtgatgtctgccaaaagtacatgccaacctatatagtgctagatactgtaaagtctcttcttctcaaaggaacctactgtctagtttgagatataattaatgcttgtctgcataaaaacaatatagataatataaagaagtgcagtatgaattatagaaagtgtgttatagagattcagagcagggaggaaaagttagggtagattattattaaagggttaaggaaaggtaagtttcaaggaatttggttatttttaatgtatggatatactggcattttatttggttttagcatatgatttatagttggtgatttccgtatatttgtttgtttttctttttttttgtttgtttgttttgttttgttttaaataagccttgttcttaggtttggaacagtctggtctcctgtgtttcatgtttcacctaagtcataaataaaggtaatgtcctaaaaaaaaaaaaaaaaaaaaaaaaaaaaaaaaaaaaaaaaaaaaaaaaaaaaaaaaaaaaaaaaaaaaaaaaaaaaaaaaaaaaaaaaaaaaaaaaaaaaaaa

SEQ ID NO: 57524 - DNA, 3122 bp, Homo Sapiens
actcgaacgcgcgacggcggggggaagatggcggagtccggcggtagcagcggtggtgctggtggcggcggcgctttcggcgcgggcccgggccccgagcgcccgaacagcacggccgacaagaacggggccctcaagtgcaccttctcggcacccagccacagcaccagcctcctgcagggcctggccaccctccgcgctcagggccagctcctcgatgttgtgctgactattaacagagaggcctttcctgcacacaaggtcgtcctggctgcctgcagcgactacttcagggccatgttcaccggcggcatgcgggaggcaagccaggacgtcatcgagctgaagggcgtgtcggcccgtggcctgcggcacatcatcgacttcgcctacagcgccgaggtgacactggacctggactgcgtgcaggacgtgctgggcgcggccgtgttcttgcagatgctgcccgtggtggagctgtgcgaggagttcctgaaggcggccatgagcgtggagacctgcctcaacatcggccagatggccaccaccttcagcctggcctcgctgcgagagtcggtggatgccttcaccttccggcacttcctgcagatcgccgaggaggaggatttcctgcgcctgccactggagcgcctggtcttcttcctgcagagcaaccggctgcagagctgtgccgagatcgacctgttccgcgcggccgtccgctggctgcagcatgacccggcccggcggccgcgcgccagccacgtgctctgccacattcgcttcccgctcatgcagtcgtccgagctggtggacagcgtgcagacgctggacatcatggtggaggacgtgctgtgccgccagtatctgctggaggccttcaactaccaggtgctgcccttccggcagcacgagatgcagtctccgcgcaccgccgtgcgctcggatgtgccctcgctcgtcaccttcggcggcacgccctacaccgacagcgaccgctcggtcagcagcaaggtctaccagctgcctgagccgggagcccgccacttccgcgagctcacggagatggaggtaggctgcagccacacgtgcgtggccgtgctggacaattttgtgtacgtggccggggggcagcacctgcagtaccgcagcggcgagggcgcagtggacgcctgctaccgctacgacccccacctgaatcgctggctgcgcctgcaggccatgcaggaaagccgcatccagttccagctgaacgtgctgtgcggcatggtgtacgccacgggcggccgcaaccgagccggcagcctggcctccgtggagcggtactgcccccggcgcaatgagtggggctacgcctgctcgctgaagcgccgtacctggggccatgctggggccgcctcagggggccgcctctacatctcgggtggctacgggatctcagtggaggacaagaaggccctgcactgctacgaccccgtggccgaccagtgggagttcaaggcgcccatgagcgaaccccgcgtgctacacgccatggtgggtgccggcggccgcatctatgccctcgggggccgcatggaccacgtggaccgctgcttcgacgtgctggctgtggagtactatgtgccggagacggaccagtggaccagcgtgagccccatgcgggccggccagtcagaggccggctgctgcctgctggagaggaagatctacatcgtcgggggctacaactggcgtctcaacaacgtcacgggcatcgtacaggtgtacaacacggacaccgacgagtgggagcgggacctgcacttcccggagtccttcgcaggcatagcctgcgcccccgtcctgctgccccgggccgggaccaggaggtagcccccaagacccccgggaccctggcctgaccgcatgttgtctccaagtggggcttggcgaatgcacgtctgcctgagaaccccagtgccccccttcgcccgggctgcccttgaggggcctgctgcgttgataagcccccctcccaggggtccctccctccctccttcccaaagcagatcctggctgcgagtccatccgagggagcctgccggcaaagcgtctgacatgtggtggcagcaaattcgtccccggggtggtttcctcgcctggcccccgagtccccacgggctggcgggtggaatcccaggtctccagggggtccctgtgcagctccatctcacttctctactgcctcccagccccacggtttcaggcattcagatgtgagctcatcaacattgaacccaaagtcggtggtatatgactcaccctccttccaagtctcctgcgcgcgtgtttttaaaataaactcacccgaaacgtccgtaacacacggacctccaggagcagtgagaggtggcttagaagcccctggtttggggtgggtggaggaggagggcacgtgtctgcctcccctggggtgccctccttcccccatcccaagctgctgaggggaggccctggtcatgcctcagttcctgccttcatctgctttccggaggaaaaaccatatcaactcctagaaacgctccttaggggcttgggaccttccatttggcactgagcatcttgtggggccttaactggctgagacatcccggccctctacatttgccctgttggccaggcagtccccttcccgcaattggagggcgacgctaacttcagaatcccatagtggcgcttgccgcaggtctggtggggtgtcttttttctcctccctcctttccacccctccgcgccctgccactccctggcctgccctgtttttgggtcaacattgctacggagccagcagtgaggcctttcccttcaagggctctgtggtatctctggccacatttgttctaatgtctgaacctctaaatcttttctttttgattggttttactgtttttaagaagccagcactgctgtctcatagatgggatttgtactcttggggcaacttaaagtgtctctctcgctgctaacagacgattgatgtcttgtctctgtgacccactcaccatgtaaagaattaacctcctatcttagcagacatcgtctcctaatatttccctttatttaataaaaatgttatggtg

SEQ ID NO: 57525 - DNA, 6757 bp, Homo Sapiens
ttcagtttctaaaaacaactacattacctgcaatgcacaatgaaacaaagtatgccctctcttcacacaaaaaaaattctattctgttattttcacttaacaaacagctggtgcctccggcgctacgggctgggcaagatggcggccttcgggatcttgagctacgaacaccggcccctgaagcggccgcggccgcggctggggcctcccgatgtttaccctcaggaccccaaacagaaggaggatgaactgacggccttgaatgtaaaacaaggtttcaataaccagcctgctgtctctggggatgagcatggcagtgccaagaacgtcagcttcaatcctgccaagatcagttccaacttcagcagcattattgcagagaaattacgttgtaatacccttcctgacactggtcgcaggaagccccaagtgaaccagaaggataacttctggctggtgactgcacgatcccagagtgccattaacacttggttcactgacttggctggcaccaagccactcacgcaactagccaaaaaggtccccattttcagtaagaaggaagaggtgtttgggtacttagccaaatacacagtgcctgtgatgcgggctgcctggctcattaagatgacctgtgcctactatgcagcaatctctgagaccaaggttaagaagagacatgttgaccctttcatggaatggactcagatcatcaccaagtacttatgggagcagttacagaagatggctgaatactaccggccagggcctgcaggaagtgggggctgtggttccacgatagggcccttgccccatgatgtagaggtggcaatccggcagtgggattacaccgagaagctggccatgttcatgtttcaggatggaatgctggacagacatgagttcctgacctgggtgcttgagtgttttgagaagatccgccctggagaggatgaattgcttaaactgctgctgcctctgcttctccgatactctggggaatttgttcagtctgcatacctgtcccgccggcttgcctacttctgtacacggagactggccctgcagctggatggtgtgagcagtcactcatctcatgttatatctgctcagtcaacaagcacgctacccaccacccctgctcctcagcccccaactagcagcacaccctcgactccctttagtgacctgcttatgtgccctcagcaccggcccctggtttttggcctcagctgtatcctacagaccatcctcctgtgctgtcctagtgccttggtttggcactactcactgactgatagcagaattaagaccggctcaccacttgaccacttgcctattgccccgtccaacctgcccatgccagagggtaacagtgccttcactcagcaggtccgtgcaaagttgcgggagatcgagcagcagatcaaggagcggggacaggcagttgaagttcgctggtctttcgataaatgccaggaagctactgcaggcttcaccattggacgggtacttcatactttggaagtgctggacagccatagttttgaacgctctgacttcagcaactctcttgactccctttgtaaccgaatctttggattgggacctagcaaggatgggcatgagatctcctcagatgatgatgctgtggtgtcattgctatgtgaatgggctgtcagctgcaagcgttctggtcggcatcgtgctatggtggtagccaagctcctggagaagagacaggcggagattgaggctgagcgttgtggagaatcagaagccgcagatgagaagggttccatcgcctctggctccctttctgctcccagtgctcccattttccaggatgtcctcctgcagtttctggatacacaggctcccatgctgacggaccctcgaagtgagagtgagcgggtggaattctttaacttagtactgctgttctgtgaactgattcgacatgatgttttctcccacaacatgtatacttgcactctcatctcccgaggggaccttgcctttggagcccctggtccccggcctccctctccctttgatgatcctgccgatgacccagagcacaaggaggctgaaggcagcagcagcagcaagctggaagatccagggctctcagaatctatggacattgaccctagttccagtgttctctttgaggacatggagaagcctgatttctcattgttctcccctactatgccctgtgaggggaagggcagtccatcccctgagaagccagatgtcgagaaggaggtgaagcccccacccaaggagaagattgaagggacccttggggttctttacgaccagccacgacacgtgcagtacgccacccattttcccatcccccaggaggagtcatgcagccatgagtgcaaccagcggttggtcgtactgtttggggtgggaaagcagcgagatgatgcccgccatgccatcaagaaaatcaccaaggatatcttgaaggttctgaaccgcaaagggacagcagaaactgaccagcttgctcctattgtgcctctgaatcctggagacctgacattcttaggtggggaggatgggcagaagcggcgacgcaaccggcctgaagccttccccactgctgaagatatctttgctaagttccagcacctttcacattatgaccaacaccaggtcacggctcaggtctcccggaatgttctggagcagatcacgagctttgcccttggcatgtcataccacttgcctctggtgcagcatgtgcagttcatcttcgacctcatggaatattcactcagcatcagtggcctcatcgactttgccattcagctgctgaatgaactgagtgtagttgaggctgagctgcttctcaaatcctcggatctggtgggcagctacactactagcctgtgcctgtgcatcgtggctgtcctgcggcactatcatgcctgcctcatcctcaaccaggaccagatggcacaggtctttgaggggctgtgtggcgtcgtgaagcatgggatgaaccggtccgatggctcctctgcagagcgctgtatccttgcttatctctatgatctgtacacctcctgtagccatttaaagaacaaatttggggagctcttcagcgacttttgctcaaaggtgaagaacaccatctactgcaacgtggagccatcggaatcaaatatgcgctgggcacctgagttcatgatcgacactctagagaaccctgcagctcacaccttcacctacacggggctaggcaagagtcttagtgagaaccctgctaaccgctacagctttgtctgcaatgcccttatgcacgtctgtgtggggcaccatgatcccgatagggtgaatgacatcgcaatcctgtgtgcagagctgaccggctattgcaagtcactgagtgcagaatggctaggagtgcttaaggccttgtgctgctcctctaacaatggcacttgtggtttcaacgatctcctctgcaatgttgatgtcagtgacctatcttttcatgactcgctggctacttttgttgccatcctcatcgctcggcagtgtttgctcctggaagatctgattcgctgtgctgccatcccttcactccttaatgctgcttgtagtgaacaggactctgagccaggggcccggcttacctgccgcatcctccttcaccttttcaagacaccgcagctcaatccttgccagtctgatggaaacaagcctacagtaggaatccgctcctcctgcgaccgccacctgctggctgcctcccagaaccgcatcgtggatggagccgtgtttgctgttctcaaggctgtgtttgtacttggggatgcggaactgaaaggttcaggcttcactgtgacaggaggaacagaagaacttccagaggaggagggaggaggtggcagtggtggtcggaggcagggtggccgcaacatctctgtggagacagccagtctggatgtctatgccaagtacgtgctgcgcagcatctgccaacaggaatgggtaggagaacgttgccttaagtctctgtgtgaggacagcaatgacctgcaagacccagtgttgagtagtgcccaggcgcagcgcctcatgcagctcatttgctatccacatcgactgctggacaatgaggatggggaaaacccccagcggcagcgcataaagcgcattctccagaacttggaccagtggaccatgcgccagtcttccttggagctgcagctcatgatcaagcagacccctaacaatgagatgaactccctcttggagaacatcgccaaggccacaatcgaggttttccaacggtcagcagagacagggtcatcttctggaagtactgcaagcaacatgcccagcagcagcaagaccaagcctgtgctcagctctctagagcgctctggtgtatggctggtggcccccctcattgctaaactgcccacctcagtccagggacatgtgttaaaggctgctggggaagaattggagaagggtcagcacctgggttcctcttcacgcaaagaacgtgatcgacaaaagcagaagagcatgtccctattgagccagcagcccttcttatcgctggtgctaacatgtctgaaagggcaggatgaacaacgcgagggactccttacctccctctacagccaggtgcaccagattgtgaataattggcgagatgaccagtacttagatgattgcaaaccaaagcagcttatgcatgaggcactcaaactgcggctcaacctggtggggggcatgtttgacacggtgcagcgcagcacccagcagaccacggagtgggccatgctcctcctggagatcatcatcagcggcactgtcgacatgcagtccaacaatgagctcttcactactgtgttggacatgctgagcgtgctcatcaatgggacattggctgcagacatgtctagcatctcgcaaggtagcatggaggaaaacaagcgtgcatacatgaacctggcgaagaagttgcagaaggagttgggggagcgccagtcagacagtctggaaaaggttcgccagctgctgccactgcccaagcagacccgagatgtcatcacgtgtgagccacagggctcccttatcgataccaagggcaacaagattgctggcttcgattccatcttcaagaaggagggtctacaggtttccaccaaacagaagatctcgccctgggatctttttgaggggttgaagccgtcagcaccactctcttggggctggtttggaacagtccgagtggaccggcgagtggctcgaggagaggagcagcagcggttgctgctctaccacacacacctgaggccccggccccgcgcctattacctggagccactgccactgcccccagaagatgaggagccgcctgctcctaccctgctagagcctgagaaaaaggctccagagccccccaaaactgacaaaccgggggctgctccacccagtactgaggaacgcaagaagaagtccaccaagggcaagaaacgcagccagccagctaccaagacagaggactatggaatgggcccgggtcggagcggcccttatggtgtgacagtgcctccggacctcctgcaccacccaaaccctggttctataacacaccttaactacaggcaaggctccataggcctgtacacccagaaccagccactacctgcaggtggccctcgtgtggacccataccgtcctgtgcgcttaccaatgcagaagctgcccacccgaccaacttaccctggagtgctgcccacaaccatgactggcgtcatgggtttagaaccctcctcttataagacctctgtgtaccggcagcagcaacctgcggtgccccaaggacagcgccttcgccaacagctccagcagagtcagggcatgttgggacagtcatctgtccatcagatgactcccagctcttcctacggtttgcagacttcccagggctatactccttatgtttctcatgtgggattgcagcaacacacaggccctgcaggtaccatggtgccccccagctactccagccagccttaccagagcacccacccttctaccaatcctactcttgtagatcctacccgccacctgcaacagcggcccagtggctatgtgcaccagcaggcccccacctatggacatggactgacctccactcaaaggttttcacaccagacactgcagcagacacccatgataagtaccatgactccaatgagtgcccagggcgtccaggcaggcgtccgttcaacagccatcctacctgagcagcagcagcagcagcaacagcagcaacagcaacagcagcagcagcagcaacagcaacagcagcagcagcagcagcagtaccacatccggcagcagcagcagcagcagatcctgcggcagcagcagcaacagcaacagcagcagcagcagcagcagcaacagcaacagcagcagcagcaacagcaacaacagcaacaccagcagcaacagcagcaacaggcggctcctccccaaccccagccccagtcccagccccagttccagcgccaggggcttcagcagacccagcagcagcaacagacagcagctttggtccggcaacttcaacaacagctctctaatacccagccacagcccagtaccaacatatttggacgctactgagccacctggaggaactgcttgtgcactggatgtggccccaccctttcctcttaattcccaatcccattcctgggctagc

SEQ ID NO: 57526 - DNA, 2360 bp, Homo Sapiens
agcagacagagagaggaggttgtctgggacagactgctcctgacagaaggatgtcccagctgagcctgtcctggctgggcctctggccagtggcagcatccccttggctgctcctcctgctggtcggggcctcctggctcctggcccatgtcctggcctggacctacgccttctatgacaactgccgccgccttcggtgtttcccacaacccccaagacggaactggttttggggacaccagggcatggtcaaccccacagaggagggcatgagagttctgactcagctggtggccacctacccccagggctttaaggtctggatgggacccatctcccccctcctcagtttgtgccaccccgacatcatccggtctgtcatcaacgcctcagctgccattgcaccaaaggacaagttcttctacagcttcctggagccctggctgggggatgggctcctgctgagtgctggtgacaagtggagccgccaccgtcggatgctgacgcctgccttccatttcaacatcctgaagccctatatgaagattttcaatgagagtgtgaacatcatgcacgccaagtggcagctcctggcctcagagggtagtgcctgtttggatatgtttgagcacatcagcctcatgaccttggacagtctacagaaatgtgtcttcagctttgacagccattgtcaggagaaacccagtgaatatattgccgccatcttggagctcagtgcccttgtatcaaaaagacaccatgagatcctcctgcatattgacttcctgtattatctcacccctgatgggcagcgtttccgcagggcctgccgcctggtgcacgacttcacagatgccgtcatccaggagcggcgccgcactctccctagccagggtgttgatgacttcctccaagccaaggccaaatccaagactttggacttcattgatgtactcctgctgagcaaggatgaagacgggaagaagttatctgatgaggacataagagcagaagctgacacctttatgtttgagggccatgacaccacggccagtggtctctcctgggtcctgtaccaccttgcaaagcacccagaataccaggagcgctgccggcaggaggtgcaagaacttctgaaggaccgtgagcctaaagagattgaatgggacgacctggcccatttgcccttcctgaccatgtgcatgaaggagagcctgcggctgcatcccccagtcccggtcatctcccgccatgtcacccaggacattgtgctcccagacggccgggtcatccccaaaggcattatctgcctcatcagtgttttcggaacccatcacaacccagctgtgtggccggaccctgaggtctacgacccctttcgctttgacccagagaacatcaaggagaggtcacctctggcttttattcccttctcggcagggcccaggaactgcatcgggcagacgttcgcgatggcggagatgaaggtggtcctggcgctcacgctgctgcgcttccgcgtcctgcctgaccacaccgagccccgcaggaagccggagctggtcctgcgcgcagagggcggactttggctgcgggtggagcccctgagctgagttctgcagagacccactctgaccccactaaaatgacccctgattcatcaaaagtgaagcctagaattaccctaagaccctgttccacagtcctgtattccatcctagatatctactcaaaataattgagacaagtgttcaaacagaaagacgcttgtgcgtgaatgttcatggcggccctattcacagtagccaaacgatgaaaacaaccccaagctatatattaccagatgaaaggataaacaaaatgtggtccatccatacaatggagtattacacagccataaaaaggaatgaagcagtgatccctactacactgtggatgaaccttgaatgcatgatactgaatgaaagacgtcagatgcaaaaggtcacatagtgtactgtccttttatacgaaatttccagaacaggccaatctgaagagatgcatagcggattggtggctttcagcagctgtggggaggtgggactgaggagcgactgctaatcagtatggggtttcctcccgggatggtgaaaatgttccggacctagatactgacgaaggtagcacgacactgtgagtgcactaaatgctattgaattggacactttgaaatggtgaatttcgtggtatgtgaattctacctcaatcaaaaaaatttgctattttatctcacatacattttttttctgtccaggttgttcatataataatatgctgtgagcatctttccatgacattaaatcatcttaggaaacatt

SEQ ID NO: 57527 - DNA, 1712 bp, Homo Sapiens; identical to SEQ ID NO: 23430

SEQ ID NO: 57528 - DNA, 2226 bp, Homo Sapiens
ctcgacccacgcgtccgcgcgccccaggagccaaagccgggctccaagtcggcgccccacgtcgaggctccgccgcagcctccggagttggccgcagacaagaaggggagggagcgggagagggaggagagctccgaagcgagagggccgagcgccatgcgccgcgccagcagagactacaccaagtacctgcgtggctcggaggagatgggcggcggccccggagccccgcacgagggccccctgcacgccccgccgccgcctgcgccgcaccagccccccgccgcctcccgctccatgttcgtggccctcctggggctggggctgggccaggttgtctgcagcgtcgccctgttcttctatttcagagcgcagatggatcctaatagaatatcagaagatggcactcactgcatttatagaattttgagactccatgaaaatgcagattttcaagacacaactctggagagtcaagatacaaaattaatacctgattcatgtaggagaattaaacaggcctttcaaggagctgtgcaaaaggaattacaacatatcgttggatcacagcacatcagagcagagaaagcgatggtggatggctcatggttagatctggccaagaggagcaagcttgaagctcagccttttgctcatctcactattaatgccaccgacatcccatctggttcccataaagtgagtctgtcctcttggtaccatgatcggggttgggccaagatctccaacatgacttttagcaatggaaaactaatagttaatcaggatggcttttattacctgtatgccaacatttgctttcgacatcatgaaacttcaggagacctagctacagagtatcttcaactaatggtgtacgtcactaaaaccagcatcaaaatcccaagttctcataccctgatgaaaggaggaagcaccaagtattggtcagggaattctgaattccatttttattccataaacgttggtggattttttaagttacggtctggagaggaaatcagcatcgaggtctccaacccctccttactggatccggatcaggatgcaacatactttggggcttttaaagttcgagatatagattgagccccagtttttggagtgttatgtatttcctggatgtttggaaacattttttaaaacaagccaagaaagatgtatataggtgtgtgagactactaagaggcatggccccaacggtacacgactcagtatccatgctcttgaccttgtagagaacacgcgtatttacagccagtgggagatgttagactcatggtgtgttacacaatggtttttaaattttgtaatgaattcctagaattaaaccagattggagcaattacgggttgaccttatgagaaactgcatgtgggctatgggaggggttggtccctggtcatgtgccccttcgcagctgaagtggagagggtgtcatctagcgcaattgaaggatcatctgaaggggcaaattcttttgaattgttacatcatgctggaacctgcaaaaaatactttttctaatgaggagagaaaatatatgtatttttatataatatctaaagttatatttcagatgtaatgttttctttgcaaagtattgtaaattatatttgtgctatagtatttgattcaaaatatttaaaaatgtcttgctgttgacatatttaatgttttaaatgtacagacatatttaactggtgcactttgtaaattccctggggaaaacttgcagctaaggaggggaaaaaaatgttgtttcctaatatcaaatgcagtatatttcttcgttctttttaagttaatagattttttcagacttgtcaagcctgtgcaaaaaaattaaaatggatgccttgaataataagcaggatgttggccaccaggtgcctttcaaatttagaaactaattgactttagaaagctgacattgccaaaaaggatacataatgggccactgaaatctgtcaagagtagttatataattgttgaacaggtgtttttccacaagtgccgcaaattgtacctttttttttttttcaaaatagaaaagttattagtggtttatcagcaaaaaagtccaattttaatttagtaaatgttatcttatactgtacaataaaaacattgcctttgaatgttaattttttggtacaaaaataaatttatatgaaaacctgaaaaaaaaaacaaaaaaaaaaa

SEQ ID NO: 57529 - DNA, 1498 bp, Homo Sapiens
gaggccagagtgccatcgaaggtaattatagagacagtaaaatccttttactctgggaaaaataaaatgctgggtgtctcacaaaatttcagaacctgatttcaaacggatcataacaaagaggagatcaaatttagcatggtggactgctcgacaggatatatttgtcaatggaatgtttccacatattataccaccaacatgagaaaaaaatgatcattgtttatttgaagcttgatgatattctaacgctgccttttctcttctcattttagagaaaaatgagcaggcggaattgttggatttgtaagatgtgcagagatgaatctaagaggcccccttcaaaccttactttggaggaagtattacagtgggcccagtcttttgaaaatttaatggctacaaaatatggtccagtagtctatgcagcatatttaaaaatggagcacagtgacgagaatattcaattctggatggcatgtgaaacctataagaaaattgcctcacggtggagcagaatttctagggcaaagaagctttataagatttacatccagccacagtcccctagagagattaacattgacagttcgacaagagagactatcatcaggaacattcaggaacccactgaaacatgttttgaagaagctcagaaaatagtctatatgcatatggaaagggattcctaccccagatttctaaagtcagaaatgtaccaaaaacttttgaaaactatgcagtccaacaacagtttctgactacaactcaaaagtttaaatagaaaacagtatattgaaagtggtgggtttgatctttttatttagaaacccacaaaatcagaaacacagtacaaataaaacagaaatcaaactataagttgacttttagttcctaaaaagaaacatatttcaaaagcaatggaatctagaattcttataacatgaataacaaaatgtacagcaagcctatgtagttcaattaatatataaggaaaaggaaggtctttcttcatgatacaagcattataaagtttttactgtagtagtcaattaatggatatttccttgttaataaaattttgtgtcataatttacaaattagttctttaaaaattgttgttatatgaattgtgtttctagcatgaatgttctatagagtactctaaataacttgaatttatagacaaatgctactcacagtacaatcaattgtattataccatgagaaaatcaaaaaggtgttcttcagagacattttatctataaaattttcctactattatgttcattaacaaacttctttatcacatgtatcttctacatgtaaaacatttctgatgattttttaacaaaaaatatatgaatttcttcatttgctcttgcatctacattgctataaggatataaaatgtggtttctatattttgagatgttttttccttacaatgtgaactcatcgtgatcttggaaatcaataaagtcaaatatcaactaaa

SEQ ID NO: 57530 - DNA, 1208 bp, Homo Sapiens
gcgggaaacatggcggcattgagcggagtccgctggctgacccgagcgctggtctccgccgggaaccctggggcatggagaggtctgagtacctcggccgcggcgcacgctgcatcgcggagccaggccgaggacgtgagggtggagggctcctttcccgtgaccatgcttccgggagacggtgtggggcctgagctgatgcacgccgtcaaggaggtgttcaaggctgccgctgtcccagtggagttccaggagcaccacctgagtgaggtgcagaatatggcatctgaggagaagctggagcaggtgctgagttccatgaaggagaacaaagtggccatcattggaaagattcataccccgatggagtataagggggagctagcctcctatgatatgcggctgaggcgtaagttggacttatttgccaacgtagtccatgtgaagtcacttcctgggtatatgactcggcacaacaatctagacctggtgatcattcgagagcagacagaaggggagtacagctctctggaacatgagagtgcaaggggtgtgattgagtgtttgaagattgtcacacgagccaagtctcagcggattgcaaagttcgcctttgactatgccaccaagaaggggcggggcaaggtcactgctgtccacaaggccaacatcatgaaacttggggatgggttgttcctgcagtgctgtgaggaagttgctgaactgtaccccaaaatcaaatttgagacaatgatcatagacaactgctgcatgcagctggtgcagaatccttaccagtttgatgtgcttgtgatgcccaatctctatgggaacattattgacaatctggctgctggcctggttgggggagctggtgtggtccctggtgagagctatagtgcagaatacgcagtctttgagacgggtgcccggcacccatttgcccaggcagtgggcaggaatatagccaatcccacggccatgctgctgtcggcttccaacatgctgcggcatcttaatcttgagtatcactccagcatgatcgcagatgcggtgaagaaggtgatcaaagttggcaaggttcgaacctctgacatgggtggctatgctacttgccatgacttcactgaggctgtcattgctgccttgccccacccataggccctgtccatacccatgtaaggtgttcaataaagaacatgaaccaa

SEQ ID NO: 57531 - DNA, 1280 bp, Homo Sapiens
ctaaagttctgaaagacctgttgcttttcaccaggaagttttactgggcatctcctgagcctaggcaatagctgtagggtgacttctggagccatccccgtttccccgccccccaaaagaagcggagatttaacggggacgtgcggccagagctggggaaatgggcccgcgagccaggccggcgcttctcctcctgatgcttttgcagaccgcggtcctgcaggggcgcttgctgcctttgggctacgtggatgaccagctgttcgtgttctatgatcatgagagtcgccgtgtggagccccgaactccatgggtttccagtagaatttcaagccagatgtggctgcagctgagtcagagtctgaaagggtgggatcacatgttcactgttgacttctggactattatggaaaatcacaaccacagcaaggagtcccacaccctgcaggtcatcctgggctgtgaaatgcaagaagacaacagtaccgagggctactggaagtacgggtatgatgggcaggaccaccttgaattctgccctgacacactggattggagagcagcagaacccagggcctggcccaccaagctggagtgggaaaggcacaagattcgggccaggcagaacagggcctacctggagagggactgccctgcacagctgcagcagttgctggagctggggagaggtgttttggaccaacaagtgcctcctttggtgaaggtgacacatcatgtgacctcttcagtgaccactctacggtgtcgggccttgaactactacccccagaacatcaccatgaagtggctgaaggataagcagccaatggatgccaaggagttcgaacctaaagacgtattgcccaatggggatgggacctaccagggctggataaccttggctgtaccccctggggaagagcagagatatacgtgccaggtggagcacccaggcctggatcagcccctcattgtgatctgggagccctcaccgtctggcaccctagtcattggagtcatcagtggaattgctgtttttgtcgtcatcttgttcattggaattttgttcataatattaaggaagaggcagggttcaagaggagccatggggcactacgtcttagctgaacgtgagtgacacgcagcctgcagactcactgtgggaaggagacaaaactagagactcaaagagggagtgcatttatgagctcttcatgtttcaggagagagttgaacctaaacatagaaattgcctgacgaactccttgattttagccttc

SEQ ID NO: 57532 - DNA, 4089 bp, Homo Sapiens
atctaacctgtcagcccttttactcagccacagcctccggagccgttgcacacctacctgcccggccgacttacctgtacttgccgccgtcccggctcacctggcggtgcccgaggagtagtcgctggagtccgcgcctccctgggactgcaatgtgccgatcttagctgctgcctgagaggatgtctggggtgtccgagcccctgagtcgagtaaagttgggcacgttacgccggcctgaaggccctgcagagcccatggtggtggtaccagtagatgtggaaaaggaggacgtgcgtatcctcaaggtctgcttctatagcaacagcttcaatcctgggaaaaacttcaaactggtcaaatgcactgtccagacggagatccgggagatcatcacctccatcctgctgagcgggcggatcgggcccaacatccggttggctgagtgctatgggctgaggctgaagcacatgaagtccgatgagatccactggctgcacccacagatgacggtgggtgaggtgcaggacaagtatgagtgtctgcacgtggaagccgagtggaggtatgaccttcaaatccgctacttgccagaagacttcatggagagcctgaaggaggacaggaccacgctgctctatttttaccaacagctccggaacgactacatgcagcgctacgccagcaaggtcagcgagggcatggccctgcagctgggctgcctggagctcaggcggttcttcaaggatatgccccacaatgcacttgacaagaagtccaacttcgagctcctagaaaaggaagtggggctggacttgtttttcccaaagcagatgcaggagaacttaaagcccaaacagttccggaagatgatccagcagaccttccagcagtacgcctcgctcagggaggaggagtgcgtcatgaagttcttcaacactctcgccggcttcgccaacatcgaccaggagacctaccgctgtgaactcattcaaggatggaacattactgtggacctggtcattggccctaaagggatccgccagctgactagtcaggacgcaaagcccacctgcctggccgagttcaagcagatcaggtccatcaggtgcctcccgctggaggagggccaggcagtacttcagctgggcattgaaggtgccccccaggccttgtccatcaaaacctcatccctagcagaggctgagaacatggctgacctcatagacggctactgccggctgcagggtgagcaccaaggctctctcatcatccatcctaggaaagatggtgagaagcggaacagcctgccccagatccccatgctaaacctggaggcccggcggtcccacctctcagagagctgcagcatagagtcagacatctacgcagagattcccgacgaaaccctgcgaaggcccggaggtccacagtatggcattgcccgtgaagatgtggtcctgaatcgtattcttggggaaggcttttttggggaggtctatgaaggtgtctacacaaatcacaaaggggagaaaatcaatgtagctgtcaagacctgcaagaaagactgcactctggacaacaaggagaagttcatgagcgaggcagtgatcatgaagaacctcgaccacccgcacatcgtgaagctgatcggcatcattgaagaggagcccacctggatcatcatggaattgtatccctatggggagctgggccactacctggagcggaacaagaactccctgaaggtgctcaccctcgtgctgtactcactgcagatatgcaaagccatggcctacctggagagcatcaactgcgtgcacagggacattgctgtccggaacatcctggtggcctcccctgagtgtgtgaagctgggggactttggtctttcccggtacattgaggacgaggactattacaaagcctctgtgactcgtctccccatcaaatggatgtccccagagtccattaacttccgacgcttcacgacagccagtgacgtctggatgttcgccgtgtgcatgtgggagatcctgagctttgggaagcagcccttcttctggctggagaacaaggatgtcatcggggtgctggagaaaggagaccggctgcccaagcctgatctctgtccaccggtcctttataccctcatgacccgctgctgggactacgaccccagtgaccggccccgcttcaccgagctggtgtgcagcctcagtgacgtttatcagatggagaaggacattgccatggagcaagagaggaatgctcgctaccgaacccccaaaatcttggagcccacagccttccaggaacccccacccaagcccagccgacctaagtacagaccccctccgcaaaccaacctcctggctccaaagctgcagttccaggttcctgagggtctgtgtgccagctctcctacgctcaccagccctatggagtatccatctcccgttaactcactgcacaccccacctctccaccggcacaatgtcttcaaacgccacagcatgcgggaggaggacttcatccaacccagcagccgagaagaggcccagcagctgtgggaggctgaaaaggtcaaaatgcggcaaatcctggacaaacagcagaagcagatggtggaggactaccagtggctcaggcaggaggagaagtccctggaccccatggtttatatgaatgataagtccccattgacgccagagaaggaggtcggctacctggagttcacagggcccccacagaagcccccgaggctgggcgcacagtccatccagcccacagctaacctggaccggactgatgacctggtgtacctcaatgtcatggagctggtgcgggccgtgctggagctcaagaatgagctctgtcagctgccccccgagggctacgtggtggtggtgaagaatgtggggctgaccctgcggaagctcatcgggagcgtggatgatctcctgccttccttgccgtcatcttcacggacagagatcgagggcacccagaaactgctcaacaaagacctggcagagctcatcaacaagatgcggctggcacagcagaacgccgtgacctccctaagtgaggagtgcaagaggcagatgctgacggcttcacacaccctggctgtggacgccaagaacctgctcgacgctgtggaccaggccaaggttctggccaatctggcccacccacctgcagagtgacggagggtgggggccacctgcctgcgtcttccgcccctgcctgccatgtacctcccctgccttgctgttggtcatgtgggtcttccagggggaaggccaaggggagtcaccttcccttgccactttgcacgacgccctctccccacccctacccctggctgtactgctcaggctgcagctggacagaggggactctgggctatggacacagggtgacggtgacaaagatggctcagagggggactgctgctgcctggccactgctccctaagccagcctggtccatgcagggggctcctgggggtggggaggtgtcacatggtgcccctagctttatatatggacatggcaggccgatttgggaaccaagctattcctttcccttcctcttcggccctcagatgtcccttgatgcacagagaagctggggaggagctttgttttgggggtcaggcagccagtgagatgagggatgggcctggcattcttgtacagtgtatattgaaatttatttaatgtgagtttggtctggactgacagcatgtgccctcctgagggaggacctggggcacagtccaggaacaagctaattgggagtccaggcacaggatgctgtgttgtcaacaaaccaagcatcagggggaagaagcagagagatgcggccaagataggaccttgggccaaatccgctctcttcctgcccctctttctctttcttcctttactttcccttgcttttccctcttttcttactcctcctctttctctccccaacccccattctcatctgcacccttcttttctcatgtgtttgcataaacattcttttaacttctttctatttgacttgtggttgaattaaaattgtcccatttgc

SEQ ID NO: 57533 - DNA, 2358 bp, Homo Sapiens
ttttttttttttttttgcttaaaaaaaagccatgacggctctcccacaattcatcttccctgcgccatctttgtattatttctaatttattttggatgtcaaaaggcactgatgaagatattttctctggagtctccttctttctaacccggctctcccgatgtgaaccgagccgtcgtccgcccgccgccgccgccgccgccgccgccgcccgccccgcagcccaccatgtctcgccgcaagcaaggcaaaccccagcacttaagcaaacgggaattctcgcccgagcctcttgaagccattcttacagatgatgaaccagaccacggcccgttgggagctccagaaggggatcatgacctcctcacctgtgggcagtgccagatgaacttcccattgggggacattcttatttttatcgagcacaaacggaaacaatgcaatggcagcctctgcttagaaaaagctgtggataagccaccttccccttcaccaatcgagatgaaaaaagcatccaatcccgtggaggttggcatccaggtcacgccagaggatgacgattgtttatcaacgtcatctagaggaatttgccccaaacaggaacacatagcagataaacttctgcactggaggggcctctcctcccctcgttctgcacatggagctctaatccccacgcctgggatgagtgcagaatatgccccgcagggtatttgtaaagatgagcccagcagctacacatgtacaacttgcaaacagccattcaccagtgcatggtttctcttgcaacacgcacagaacactcatggattaagaatctacttagaaagcgaacacggaagtcccctgaccccgcgggttcttcacacacccccattcggcgtagtacccagagagctcaagatgtgtggcagttttcggatggaagctcgagagcccttaagttctgagaaaatttgaagcccccaggggtggggtggacgcgtgccgcccagtcgacgtcagcgtggtctgtcatcctgctagtttgtgatgttttctgacagtagcctccaagaagccgttgtgcgaagacagagtcctgcagagtccttccagcctaggcctgcagcgccattttatttatattttttaataaaaagtaaaaacaaaaaaacagacccacattggaacagtgaatcagtcccatagagagggcccgtggaccatcgctgtcatgagtgatgccctggcccttctgaaaccagccaacctaattacctgtattgtggaaatgcgcatgagtccccaaccccttgtttctatacattctatgttgtcttttaaaaagtgtgcttaacattgacacaataaatgttggagctttaggtggtgtttgcttgttctttaatttttaatgcttataagacaatgaggctgcttatgattttgtacttctgtacctgtttcctacagacacccatcgggtgggtaggaggaacagatttgagaaatgggcaggagatgtaggaggggaactaggttaccgcttatcagatggcataaattttcaaggagaatcaaaatgcaaaacttgggaataaatcatagcaatatcataattaatgtagtagtaatattgctgtttattaatgctgaagtgtggttttcctaactgtctgacttataatttgcataccattaaataatgcataatatggcacgccgaatcctgtttttcaaatatatgcttttggtggctaccatgcaggatttgaatttgtcttttaatttagcttaggaaagaacatcactgggcgagcggtaaatcctaaagaaggtgataaatgtcagtagtttcttattaaatattctaattttaggttcccaaaccttcaggaaatatatcttaatgcagacaaacaaacataaaacttctttagtacttacatcaggaaatttggggcagattttagaggggggaaattataggaggaaagaagttcacatcagaacagacaatcacagcaatgctctattccttagaaattagtgccacaaataagttacatctacaaacaggtggtaaaaattctttctggcccagttaatttgcacagaacttttctcagtttggtattttttactgcttggagatccagaagagaattagaaacaacatagcaaattaaaataggtttgtcaataatagagctcagacacctgtgtgctgtagattcacatacaggccgtgaacctaagtggggaaaatcctacctatccaccttctggctagattacctagcttagtgaaaagatagccaaataattggcatgtgaattatttcctgcttattcataataaataatgactgtcta

SEQ ID NO: 57534 - DNA, 3999 bp, Homo Sapiens; identical to SEQ ID NO: 28833

SEQ ID NO: 57535 - DNA, 1840 bp, Homo Sapiens
cccattaggtgacaggtttttagagaagccaatcacgtcgccgcggtcctggttctaaagtcctcgctcacccacccggactcattctccccagacgccaaggatggtggtcatggcgccccgaaccctcttcctgctgctctcgggggccctgaccctgaccgagacctgggcgggctcccactccatgaggtatttcagcgccgccgtgtcccggcccggccgcggggagccccgcttcatcgccatgggctacgtggacgacacgcagttcgtgcggttcgacagcgactcggcgtgtccgaggatggagccgcgggcgccgtgggtggagcaggaggggccggagtattgggaagaggagacacggaacaccaaggcccacgcacagactgacagaatgaacctgcagaccctgcgcggctactacaaccagagcgaggccagttctcacaccctccagtggatgattggctgcgacctggggtccgacggacgcctcctccgcgggtatgaacagtatgcctacgatggcaaggattacctcgccctgaacgaggacctgcgctcctggaccgcagcggacactgcggctcagatctccaagcgcaagtgtgaggcggccaatgtggctgaacaaaggagagcctacctggagggcacgtgcgtggagtggctccacagatacctggagaacgggaaggagatgctgcagcgcgcggacccccccaagacacacgtgacccaccaccctgtctttgactatgaggccaccctgaggtgctgggccctgggcttctaccctgcggagatcatactgacctggcagcgggatggggaggaccagacccaggacgtggagctcgtggagaccaggcctgcaggggatggaaccttccagaagtgggcagctgtggtggtgccttctggagaggagcagagatacacgtgccatgtgcagcatgaggggctgccggagcccctcatgctgagatggaagcagtcttccctgcccaccatccccatcatgggtatcgttgctggcctggttgtccttgcagctgtagtcactggagctgcggtcgctgctgtgctgtggagaaagaagagctcagattgaaaaggagggagctactctcaggctgcaagtaagtatgaaggaggctgatccctgagatccttgggatcttgtgtttgggagccatgggggagctcacccaccccacaattcctcctctggccacatctcctgtggtctctgaccaggtgctgtttttgttctactctaggcagtgacagtgcccagggctctaatgtgtctctcacggcttgtaaatgtgacaccccggggggcctgatgtgtgtgggttgttgaggggaacaggggacatagctgtgctatgaggtttctttgacttcaatgtattgagcatgtgatgggctgtttaaagtgtcacccctcactgtgactgatatgaatttgttcatgaatatttttctgtagtgtgaaacagctgccctgtgtgggactgagtggcaagtccctttgtgacttcaagaaccctgacttctctttgtgcagagaccagcccacccctgtgcccaccatgaccctcttcctcatgctgaactgcattccttccccaatcacctttcctgttccagaaaaggggctgggatgtctccgtctctgtctcaaatttgtggtccactgagctataacttacttctgtattaaaattagaatctgagtataaatttactttttcaaattatttccaagagagattgatgggttaattaaaggagaagattcctgaaatttgagagacaaaataaa

SEQ ID NO: 57536 - DNA, 1617 bp, Homo Sapiens
cagcaattaaagtcagcccagcaccaactccgacgccaagcgttacactggaaactactttttaaagcaacaaaagagtctaaaacaaaatacaacatttcttaaatacactgtttccagaaagagctattttaacagaagcaactcaaagatatcccttcgacagaagtggaagtgctgaaaaatgctcatctctcacacagacttttgatggacaggaggtgctgctttctgtgaaccactgaagtagagcagctgaaatcacaaaacctggaagacttggctttacgtactcccaattgtgcactagaaaacagctcatctattgctctaacagtctagttcttgatctgctgaccatgacacaaaacattgctgtttctcgacctatgataatttaaagagaacataagtttctaagtatcatgcctaccaacaagctgtaaaatgatcaccctgaacaatcaagatcaacctgtcccttttaacagctcacatccagatgaatacaaaattgcagcccttgtcttctatagctgtatcttcataattggattatttgttaacatcactgcattatgggttttcagttgtaccaccaagaagagaaccacggtaaccatctatatgatgaatgtggcattagtggacttgatatttataatgactttaccctttcgaatgttttattatgcaaaagatgaatggccatttggagagtacttctgccagattcttggagctctcacagtgttttacccaagcattgctttatggcttcttgcctttattagtgctgacagatacatggccattgtacagccgaagtacgccaaagaacttaaaaacacgtgcaaagccgtgctggcgtgtgtgggagtctggataatgaccctgaccacgaccacccctctgctactgctctataaagacccagataaagactccactcccgccacctgcctcaagatttctgacatcatctatctaaaagctgtgaacgtgctgaacctcactcgactgacattttttttcttgattcctttgttcatcatgattgggtgctacttggtcattattcataatctccttcacggcaggacgtctaagctgaaacccaaagtcaaggagaagtccataaggatcatcatcacgctgctggtgcaggtgctcgtctgctttatgcccttccacatctgtttcgctttcctgatgctgggaacgggggagaacagttacaatccctggggagcctttaccaccttcctcatgaacctcagcacgtgtctggatgtgattctctactacatcgtttcaaaacaatttcaggctcgagtcattagtgtcatgctataccgtaattaccttcgaagcatgcgcagaaaaagtttccgatctggtagtctacggtcactaagcaatataaacagtgaaatgttatgaataataaggttctttcatttcaatcccatcaaaattcacttcactaactactctggcgtcaatggatattctgtataatactatcaagtcccttttctcttgaaaaaataaattcattatcttcattttaaaaacttatataaaacatttttgtgaattaaaaaaaaaaaaaaa

SEQ ID NO: 57537 - DNA, 13664 bp, Homo Sapiens
aattttatttggaacaaatgcagattttttttcttcctgaaaatgaatatttctctgggtccacgtttaatgtaattatttctctttctttttctcatttaatgaagatagtgaattgctagtctctagaaattctatacagttttacagttcaaatagcctttttgtaatgttttaaaaaattactgcgtcattggatttggaaaacagtgacccaccttctccatgtacaaaaacagcagataggaattgccaaattttcactttggtaaaatcacagaaacagatacattataatacattcaatctgttcattgtaatttttttcccacagattcaagaatggctttgtttaaattgccaaacccagagagcaatatcaggacagcttggagacatacgcaaaatgccacctgcaccatcaggacccaaagcatctcctatgcctgttcctacagaatcatcatctcagaaaacagcagtgcctccccaagtaaaattagtgaaaaagcaagaacaagaagtaaaaacggaagctgaaaaagtcattctggaaaaagtaaaggaaacactatcaatggaaaaaattcctcctatggtaaccacagatcaaaaacaagaagagagtaaactagagaaagacaaagcttcagctcttcaagaaaaaaagccactccctgaagaaaaaaaactaatccctgaagaagaaaagatacgttctgaagaaaaaaagccactcctagaagaaaaaaagccaacccctgaagacaaaaagctactcccagaggcaaaaacatcagccccagaagaacagaaacatgacttacttaaatctcaagtacaaattgctgaagaaaagcttgaaggcagagtggctccaaagacagtgcaagaagggaaacaaccacagaccaagatggaaggtttaccatctggcacacctcagagtttacctaaagaagatgataagacaaccaaaacaataaaagaacagccacagccaccatgcacagcaaaacctgatcaggtggaacctgggaaagaaaaaacagaaaaggaagatgacaaatcagacacctcaagttctcagcagcctaaaagcccccaaggtctgagcgacacgggatattcttccgatggaatatcaagctcacttggtgaaattccaagtcttattccaactgatgaaaaggatattctcaagggactcaaaaaggactctttttcacaagaaagcagcccttccagcccctcagatttggctaagttagaaagtacagtcctatctattttggaagctcaagcaagtacacttgctgatgaaaagtcagaaaagaaaacacaaccccatgaagtttctcctgaacagcctaaagaccaagagaaaactcagagtttatctgaaaccttggaaattactatttcagaagaggagatcaaagagagtcaagaagaaaggaaagacacttttaaaaaagatagccaacaagatattccttccagcaaggaccataaagagaagtctgagtttgttgatgacataactactagaagagagccttatgattcagttgaagagagtagtgaaagtgaaaactcacctgttccacaaagaaaacgaagaactagtgttggctcatcaagcagtgatgagtataaacaggaagacagccaaggatcaggggaagaggaggacttcattcgaaaacaaatcatagaaatgagtgctgatgaagatgcttcaggttctgaagatgatgagttcatcagaaaccagctcaaagagattagtagcagtactgagagccagaagaaggaagaaacaaagggaaaaggcaaaataacagcagggaaacacagacgactgactcgaaaaagtagcacaagcattgatgaagatgcaggaagacgtcactcatggcatgatgaagacgatgaagcatttgatgaaagtcctgaacttaaatacagagaaactaaaagtcaggaaagtgaagaacttgtagttactggaggaggagggctacgccgatttaaaacaattgagctcaacagtacaatagcagataaatattctgcagagtcatcacagaaaaaaacaagtttgtattttgacgaagagccagaattggaaatggaaagcctgacagactcacctgaagataggtcaaggggagagggatcttcgagtctgcatgcttccagcttcactcctggtacatcccctacatcagtatcatcacttgatgaggacagtgacagtagcccgagtcacaaaaaaggagagagcaaacagcaacgcaaagctcggcacagaccacatggccctcttttgcctactattgaagattcttcagaggaagaagaattgagagaggaagaagaattattaaaggagcaagaaaagcagagggaaatagaacagcaacaaagaaagagttctagtaaaaaatcaaagaaagacaaagatgaacttcgagctcagagaagaagggaaaggccaaagacaccacctagtaatctctctcccattgaagatgcatctccgacagaagagttacgtcaggctgcagaaatggaggagctccatagatcttcttgttctgaatattcacctagcatagagtcagacccagaaggttttgaaataagcccggaaaaaataatagaagtacaaaaagtttataaattgcccacagctgtttcattatactcaccaacagatgagcaatctattatgcagaaagaaggtagccaaaaggcgttaaaaagtgctgaggagatgtatgaagaaatgatgcataaaacacacaaatacaaagcttttccagctgcaaatgaacgagatgaagtgtttgaaaaagagcctttgtatggtgggatgctaatagaggattatatttatgaatctttagtagaagacacgtacaatggatcggtagatggcagtctgctaacaaggcaagaagaagaaaatggatttatgcagcagaaaggaagagagcaaaagataagactttcagaacagatttatgaagatcctatgcagaaaattacagacctccagaaagagttttatgagttagaaagcttacattctgttgtgcctcaggaagatattgtttcaagctcttttatcatcccagaaagccatgagatagtggacctgggtactatggtaacttctacagaagaagaaaggaaactactagatgctgatgctgcctatgaagaacttatgaagaggcaacagatgcaattaacacctggatctagcccaacccaggcccccattggtgaggatatgacagagtccaccatggactttgacagaatgccagatgcctctttgacatcaagtgttctctcaggagcgtctcttacagattcgaccagcagtgcaacactctctatcccagatgttaaaataacccaacatttttcaacagaagaaattgaggatgaatatgtaaccgattatacaagagaaattcaagagataattgcccatgaatcgctgattttgacctactcggagccttcagaaagtgctacatctgtcccaccctctgacacaccttctctcacatcatctgtttcttcggtctgtaccacagatagctcttcacccattactaccctggatagcataaccacagtttatacagagccagtggacatgataactaaatttgaagattctgaggaaatttcttcatcaacttattttccaggcagcattatagactatccagaagaaataagtgtatctttagatcggactgccccaccagatggtagagctagtgctgatcatattgttatttccttatctgatatggcatcttctatcatagaatctgtagtacctaaacctgaagggccagttgctgacactgtttctactgacttacttatatctgaaaaggacccagtgaagaaagccaagaaggaaactgggaatggaatcattctggaagttttggaagcttacagagataaaaaggagttggaggccgaacgaacaaaaagtagcttatccgaaaccgtgtttgatcacccaccttcttctgtaatagcccttccaatgaaagagcagctttcaactacatactttacatctggagagacctttggtcaggaaaaacctgcatctcagttaccatctggcagtccttctttaacagttgcatctccagtgactacagctacacctctgtttgatgctgttactactctagagaccacagctgttctgagaagtaatggattacctgttacaagaatatgtactactgcacctcctcctgttcctcctaagccatcttcaattccatctggacttgtatttacccacaggcctgagccaagcaaacctccaatcgcccccaaaccagtgattcctcagcttccaacaactacacaaaaaccaacagatatacaccccaaaccaacaggcctatctttaacttcaagtatgaccttaaatttagtgacttcagcagattataaattgccttcccctacctccccactttccccacactccaacaagtcttcaccaagattttccaaatccctcacagaaacttatgtagttattacattgccatctgaaccagggactccaacagattcttctgctagtcaagcaattaccagttggcccttgggatcaccctccaaagatctggtttctgttgaacctgtgttttctgtagttcctcctgtgacagctgtagaaattccaatttcttcagaacagaccttctacatctctggagctttacagacattttctgctacccctgtcacagcaccctcttcatttcaagcagctcccacatcagttacacagtttctcactactgaagtttccaagactgaggtttcagcaaccagaagtacagctcctagtgttggtctcagcagcatttccataacaattcctccagagcctcttgctctagataacatacatttagagaagcctcagtataaagaagatggaaaattgcaacttgttggtgatgtaattgatttgcgtacagtaccaaaggtagaagttaaaacaactgataaatgtattgatctttctgcttctacaatggatgtgaaaaggcagatcacagcaaatgaagtttatgggaaacaaattagtgctgtccaaccctctattataaatcttagtgtgacatcatcaatagtgactcctgtatctctggccactgagacagtgacctttgtcacatgcacagctagtacaagttacactacaggcacagaaagcctagtgggtgcagaacatgcaatgacaacaccactccaacttacaacatcaaagcatgctgagcccccatacaggataccaagtgaccaggtctttcctatagctagggaagaagcaccaataaacttatctctaggtactccagcacatgcagtgacattggctattacaaaacctgtcactgtgcctcctgttggtgtcacaaatggatggactgatagcaccgtatcccagggaatcactgatggggaagtagtggatctcagtacaaccaagtctcacagaacagtcgtaacaatggatgagtctacttcaagtgtgatgaccaaaataatagaagatgatgaaaaacccgttgatttaaccgcagggagaagagctgtgtgctgtgatgtggtttataaattaccatttggaaggagctgcacagcacagcagcctgcaactactcttcctgaggatcgttttggttatagggatgaccactatcagtatgatcgatcagggccatatggttatagagggattgggggaatgaagccttccatgtctgacacaaatttagcagaagctggacattttttctataaaagtaagaatgcttttgattattctgaaggaactgacacagcagtagatctgacttcagggagagttactacaggtgaggtaatggattattcaagcaagactacaggtccatatccagaaacacgacaagtcatttcaggagctgggattagtaccccacagtattccacagcaagaatgacaccaccaccaggaccccagtattgtgtggggagtgttttgaggtcatctaatggtgttgtctattcttcagtagcaactccaacaccctctacatttgctatcaccacacaacctggctccattttcagcaccacagtgagggatttgtctggtattcatacggctgatgcagtgacttcattacctgccatgcaccatagccagccaatgcctagatcatattttataacaacaggtgcatctgaaacggacattgcagtaactggtattgatatcagtgccagtttgcaaactattactatggagtctcttactgctgagacgatagactctgttcccactttaaccacagcatccgaagtgtttcctgaagtggtgggagatgaaagtgctcttttaattgtccctgaagaagataaacaacagcagcagctagacttggagcgtgagctcctggaactggagaaaattaagcaacagcgctttgctgaggaattggagtgggaacgtcaggaaattcaaaggttccgagaacaagaaaagatcatggttcagaaaaagttggaggagctgcagtctatgaagcaacaccttctctttcagcaagaagaagagcggcaagcccagttcatgatgaggcaggagacgttagctcagcaacagttacagcttgagcagatccaacagctgcaacaacagcttcaccagcagctggaggagcaaaagattcggcagatctaccagtataactatgacccttctggaactgcttctccacaaaccactacagagcaggcaattttggaaggtcagtatgctgctctggaaggcagtcaattttgggcaactgaagatgcaaccaccacagcttcagctgttgtggcaattgaaataccacaaagccaaggatggtacaccgttcagtctgatggtgttactcagtacattgccccacctggtatcctgagcactgtttcagaaatacctctaacagatgttgttgtgaaagaggaaaaacaacccaaaaagagaagttctggagctaaagtccgaggacagtatgatgacatgggagaaaatatgacagatgatccccgaagttttaaaaagatagtggacagtggtgtacaaacggatgacgaagatgccacagatcggagctatgtgagtaggagaaggagaactaaaaagagtgtggatacaagcgtccaaactgatgatgaagatcaggatgagtgggatatgcctactagatcaaggaggaaagctcgtgtagggaaatatggtgacagcatgacagaggctgacaagaccaaacccctttccaaagtctccagcatagcagttcaaacggtagcagagatatctgtgcaaactgaaccagttggaaccataagaacaccctccatacgggcacgagtggatgccaaggtagaaataattaaacacatttcagcacctgaaaagacttacaaagggggcagtttaggatgtcaaacagaagcagattcagacacacaaagtcctcaatatctgagtgccacatctccacccaaagacaagaaacgcccaacacctttagagattggttattcatctcacctccgggcagattccacagtacagctggctccttccccacccaaatcccccaaagtcctttactcacccatctcaccactttcaccaggcaaagccttagaatcagcctttgtaccttatgaaaaacccctccctgatgatataagtccacagaaagtactgcatccagatatggctaaagttcccccagcaagtcctaagacagccaagatgatgcagcgttctatgtctgaccccaagcctctgagtccaacagcagacgaaagttccagggctccttttcagtataccgagggctatacgactaaaggttctcaaaccatgacatcctctggagcccagaaaaaagttaaaagaactctgccaaatccacctcctgaggagatttccacaggaactcaatccacattcagcacaatgggcacagtttccaggagaaggatctgcagaaccaacacaatggcacgagccaagattctccaggacatagacagagagcttgatcttgtggaaagggagtctgcaaaacttcgaaagaaacaagcagagcttgatgaagaagaaaaggagattgatgctaagctacgatacctggaaatgggaattaacaggaggaaagaggccctattaaaggagagagaaaagagagaacgagcctacctccagggagtagctgaggatcgtgattacatgtctgacagtgaagtgagtagcacaagaccaacccgaatagaaagtcagcatggcattgagcgaccaagaactgctccccaaactgaattcagccagtttataccaccacaaacccaaacagaatctcaactagttcctccgacaagtccttacacacaataccagtactcttcccctgctcttcctacccaagcacccacctcatacactcaacagtctcattttgagcaacaaactttgtaccatcagcaagtttcaccttatcagactcagccaacattccaagctgtggcaacaatgtccttcacacctcaagttcaacctacaccaaccccacagccttcttatcagttaccttcacagatgatggtgatacaacagaagccacggcaaactacattatatttggagcccaagataacctcaaactatgaagtgattcgcaaccaaccccttatgatagcacctgtttctacggataacacatttgctgtttcccatcttggtagtaagtacaatagtttagacttgagaataggtttggaggaaagaagtagcatggcaagcagtccaatatcaagcatatctgcagattctttctatgcagatattgatcaccatactccacgaaattatgtcctaattgacgacattggagagatcaccaaaggaacagcggcattaagcaccgcatttagccttcatgaaaaggatctgtcaaaaacagaccgtctccttcgaaccactgagacacgccggtctcaagaagtgacagatttcctagcacctttacagtcttcctctagattgcatagttatgtgaaggcggaggaagacccaatggaggatccttacgagttaaagcttctgaaacatcagattaaacaggaatttcgtagagggacagagagcttagatcaccttgctggtctttctcattattaccatgctgatactagctacagacattttccaaaatctgagaagtatagcatcagtagactcacacttgaaaaacaagcagcaaaacaactgccagcagccatactttatcaaaagcagtcaaagcataagaaatcactaattgaccctaaaatgtcaaaattttcacctattcaagaaagtagagaccttgaacctgattattcaagctatatgacttctagcacttcatctattggtggcatttcctccagggcaaggctccttcaagatgacatcacttttggcctcagaaaaaatattacagaccaacaaaaatttatgggatcttctcttggcacaggactgggcacattaggaaataccatacgctcagctctgcaggatgaagcggataagccatacagtagtggcagcaggtccagaccttcctccagaccttcctctgtctatgggcttgatttatcaattaaaagggattcttctagctcttccctaagactgaaagctcaagaggctgaagctctagatgtttcctttagtcatgcatcatcctctgccagaactaagccgaccagtttgccaattagtcaaagtagaggaagaataccaattgtggcccagaattctgaagaagaaagcccactcagtcctgttggccagccaatgggaatggccagggctgcagctggacccctgccaccaatatctgcagacaccagggatcagtttggatcaagccactcattgcctgaagttcagcaacacatgagggaagaatcacggactcgaggctatgaccgtgacatagcattcatcatggatgacttccaacatgccatgtcagacagtgaagcctatcatctgcgtcgtgaggaaacagattggtttgataaacccagggagtctcgtttggaaaatggacatggtctggaccgaaaactgccggaaagattggtccactctagaccactcagtcaacatcaagagcaaattatacagatgaacgggaaaactatgcactacatctttcctcacgcaaggataaaaataacaagagactcaaaggatcacacagtttcaggtaatggattaggaattagaattgtgggtggtaaagaaatcccgggacatagtggagaaattggagcctatattgccaagattcttcctgggggaagtgcggaacagacggggaagcttatggaagggatgcaagtattggaatggaatggaattcccttgacttctaaaacatatgaagaagttcagagtatcattagtcagcaaagtggggaagcagaaatatgtgtaagactggacctcaatatgctatcagattctgaaaattcccagcatctggaacttcatgagccaccaaaagctgtggataaggcgaaatccccaggggttgatcctaagcagttggcagcagaactccagaaggtttcactacagcagtcaccgctggttctgtcatcagttgttgaaaaaggatctcatgttcattcaggtcctacatcagcaggatccagttccgttcccagccctgggcaaccagggtccccctcagtgagcaaaaagaagcacggcagcagcaagcctaccgatggaacaaaggttgtctctcatccaattacaggagaaattcagcttcaaattaactatgatcttggaaatctcataatacatattctccaagcaagaaatcttgttcctcgagacaacaatggttattctgacccttttgtgaaagtgtaccttcttccagggagaggtcaagtcatggttgtccagaatgcaagtgctgagtacaagagaaggactaaacatgtccagaaaagtcttaatcctgagtggaatcaaacagtaatttataaaagtatttccatggaacagctcaagaagaaaacactggaggtgacagtttgggattatgatagattttcatccaacgacttccttggggaggtattgattgatttatctagcacagctcacctcgataacactccaaggtggtatcctctcaaagaacagactgaaagcattgatcatggcaagtctcattccagtcagagcagccagcagtccccaaagccatctgttatcaaaagcagaagccatggtatcttccctgacccatcaaaggacatgcaggttcccaccattgagaaatcccatagtagtcctggtagctcaaaatcatcatcagaaggccatctccgttctcatggaccatctcgcagtcaaagcaaaaccagcgtcactcagacccacctggaagatgcaggggctgccatagctgctgccgaagctgccgtgcaacaactccgcattcaaccaagtaaaagacgcaaataaattcctcagcatggcagcttaatgttcatctgttgcctttctttcctgctgtcctttcctgtttgctttcagttttcaacatcctctgctcaccctgttctctgtccctttgtctgtgtaagaacgatataaatacattaatatgctctttcttatttagattttttttatttacatagactgaaataaaactggctgtttctcctttgtttccaccatccatccaacctggctcctagcatttgatacagtgtctgtgatgtttggaagcaaagcaatgttgtgtgtcctttttgtttgcgcttaaatatcttttagaatacagaaattataagcacaagtggctgccagttttccaggacttataccaaaaaaaaaaaaagtgcacacatataagtatttagagcagatttgcaattagattcttgtatctgaaaacactcaaaaagtctaggcagaagataatgcaaccaacagtcaacttctagaaccttggaggaaaagccatttcaagacagtgctttaaaacactaacaaattttgcttctgaaatatggtagctttccatgtgcaaaaaattgtagtcttctgaaaaatctgtgaagaaaatcttatttcttacattctcaaaaaactacattaaattaatatatgtataagcatatgtgataaggcaatgcaacctcactgaggagcacaattgggtccattctgttggatcacactttgtatgtgatgacagattttacagatattttttctaaccattggaaatcaagatatactatgtctggtagctataagtcaatcaaagtataacaattgacctatcttaactgctgtattttcatttcatttgtgaaaatttagtcgattgatataattatataaaaacttaatatgtgcaaatatttcacaaatgtaggtaccctgttacttctaaaaggcattagccaggcaatggagatagatcattgttctctccatctccctagtcatcattttcaaagaaacagccagttttaaacccctttagtgctgtgcatgtggtgtcattttggcatttgaaaacacaacctatttaaatagagcaaaagagcacttctgtttgcatgaataacatttaagctggttccatctgaggatacatactctgggtttccatttcacccacactgccacagcagcacataaaagcggtcagtctaatcatgccaggaagcagcacagacacagcatagcaggagtcctccccattcaaagaactcagtctgataatctgcctccaccagccaatggcaaccaagaccaaagccagctagccctcaggaaggtgatgtctgatggaccagtcaagccagaaggaggtgagcagaaaggccctgttcaaagcacacagcaagaacatccccaaatttaaagctctcatctttaatttttagagattgtctgataaaatatgtttatccactttttaatgtgcttttgtgggcatggcatttcaggacttcatcatcaccatgtaagtcccaagatcagtcccgtaatatattgactacagtgatttgtatttttctatgcactgggcatcttttgacttttgttgggaaatagattaacaatattcatattgcagaatggaatgcatgctactaacctaatctgttcaagcatgactataaatatgtttcattgtgataaaagtttaaattgctcacagttcaagttagcctaccagttggaatgtggatcagtgtttgttgcctattatttcaagtgtaacttttaaaaatttagtggattttgaaaattcttagaggaaagtaaaggaaaaattgttaatgcactcatttacctttacatggtgaaagttctctcttgatcctacaaacagacattttccactcgtgtttccatagttgttaagtgtatcagatgtgttgggcatgtgaatctccaagtgcctgtgtaataaataaagtatctttatttcattcat

SEQ ID NO: 57538 - DNA, 4737 bp, Homo Sapiens
gccccgggaagcgcagccatggctctgcggaggctgggggccgcgctgctgctgctgccgctgctcgccgccgtggaagaaacgctaatggactccactacagcgactgctgagctgggctggatggtgcatcctccatcagggtgggaagaggtgagtggctacgatgagaacatgaacacgatccgcacgtaccaggtgtgcaacgtgtttgagtcaagccagaacaactggctacggaccaagtttatccggcgccgtggcgcccaccgcatccacgtggagatgaagttttcggtgcgtgactgcagcagcatccccagcgtgcctggctcctgcaaggagaccttcaacctctattactatgaggctgactttgactcggccaccaagaccttccccaactggatggagaatccatgggtgaaggtggataccattgcagccgacgagagcttctcccaggtggacctgggtggccgcgtcatgaaaatcaacaccgaggtgcggagcttcggacctgtgtcccgcagcggcttctacctggccttccaggactatggcggctgcatgtccctcatcgccgtgcgtgtcttctaccgcaagtgcccccgcatcatccagaatggcgccatcttccaggaaaccctgtcgggggctgagagcacatcgctggtggctgcccggggcagctgcatcgccaatgcggaagaggtggatgtacccatcaagctctactgtaacggggacggcgagtggctggtgcccatcgggcgctgcatgtgcaaagcaggcttcgaggccgttgagaatggcaccgtctgccgaggttgtccatctgggactttcaaggccaaccaaggggatgaggcctgtacccactgtcccatcaacagccggaccacttctgaaggggccaccaactgtgtctgccgcaatggctactacagagcagacctggaccccctggacatgccctgcacaaccatcccctccgcgccccaggctgtgatttccagtgtcaatgagacctccctcatgctggagtggacccctccccgcgactccggaggccgagaggacctcgtctacaacatcatctgcaagagctgtggctcgggccggggtgcctgcacccgctgcggggacaatgtacagtacgcaccacgccagctaggcctgaccgagccacgcatttacatcagtgacctgctggcccacacccagtacaccttcgagatccaggctgtgaacggcgttactgaccagagccccttctcgcctcagttcgcctctgtgaacatcaccaccaaccaggcagctccatcggcagtgtccatcatgcatcaggtgagccgcaccgtggacagcattaccctgtcgtggtcccagccggaccagcccaatggcgtgatcctggactatgagctgcagtactatgagaaggagctcagtgagtacaacgccacagccataaaaagccccaccaacacggtcaccgtgcagggcctcaaagccggcgccatctatgtcttccaggtgcgggcacgcaccgtggcaggctacgggcgctacagcggcaagatgtacttccagaccatgacagaagccgagtaccagacaagcatccaggagaagttgccactcatcatcggctcctcggccgctggcctggtcttcctcattgctgtggttgtcatcgccatcgtgtgtaacagaagacgggggtttgagcgtgctgactcggagtacacggacaagctgcaacactacaccagtggccacatgaccccaggcatgaagatctacatcgatcctttcacctacgaggaccccaacgaggcagtgcgggagtttgccaaggaaattgacatctcctgtgtcaaaattgagcaggtgatcggagcaggggagtttggcgaggtctgcagtggccacctgaagctgccaggcaagagagagatctttgtggccatcaagacgctcaagtcgggctacacggagaagcagcgccgggacttcctgagcgaagcctccatcatgggccagttcgaccatcccaacgtcatccacctggagggtgtcgtgaccaagagcacacctgtgatgatcatcaccgagttcatggagaatggctccctggactcctttctccggcaaaacgatgggcagttcacagtcatccagctggtgggcatgcttcggggcatcgcagctggcatgaagtacctggcagacatgaactatgttcaccgtgacctggctgcccgcaacatcctcgtcaacagcaacctggtctgcaaggtgtcggactttgggctctcacgctttctagaggacgatacctcagaccccacctacaccagtgccctgggcggaaagatccccatccgctggacagccccggaagccatccagtaccggaagttcacctcggccagtgatgtgtggagctacggcattgtcatgtgggaggtgatgtcctatggggagcggccctactgggacatgaccaaccaggatgtaatcaatgccattgagcaggactatcggctgccaccgcccatggactgcccgagcgccctgcaccaactcatgctggactgttggcagaaggaccgcaaccaccggcccaagttcggccaaattgtcaacacgctagacaagatgatccgcaatcccaacagcctcaaagccatggcgcccctctcctctggcatcaacctgccgctgctggaccgcacgatccccgactacaccagctttaacacggtggacgagtggctggaggccatcaagatggggcagtacaaggagagcttcgccaatgccggcttcacctcctttgacgtcgtgtctcagatgatgatggaggacattctccgggttggggtcactttggctggccaccagaaaaaaatcctgaacagtatccaggtgatgcgggcgcagatgaaccagattcagtctgtggaggtttgacattcacctgcctcggctcacctcttcctccaagccccgccccctctgccccacgtgccggccctcctggtgctctatccactgcagggccagccactcgccaggaggccacgggccacgggaagaaccaagcggtgccagccacgagacgtcaccaagaaaacatgcaactcaaacgacggaaaaaaaaagggaatgggaaaaaagaaaacagatcctgggagggggcgggaaatacaaggaatattttttaaagaggattctcataaggaaagcaatgactgttcttgcgggggataaaaaagggcttgggagattcatgcgatgtgtccaatcggagacaaaagcagtttctctccaactccctctgggaaggtgacctggccagagccaagaaacactttcagaaaaacaaatgtgaaggggagagacaggggccgcccttggctcctgtccctgctgctcctctaggcctcactcaacaaccaagcgcctggaggacgggacagatggacagacagccaccctgagaacccctctgggaaaatctattcctgccaccactgggcaaacagaagaatttttctgtctttggagagtattttagaaactccaatgaaagacactgtttctcctgttggctcacagggctgaaaggggcttttgtcctcctgggtcagggagaacgcggggaccccagaaaggtcagccttcctgaggatgggcaacccccaggtctgcagctccaggtacatatcacgcgcacagcctggcagcctggccctcctggtgcccactcccgccagcccctgcctcgaggactgatactgcagtgactgccgtcagctccgactgccgctgagaagggttgatcctgcatctgggtttgtttacagcaattcctggactcgggggtattttggtcacagggtggttttggtttagggggtttgtttgttgggttgttttttgttttttggttttttttaatgacaatgaagtgacactttgacatttcctaccttttgaggacttgatccttctccaggaagaaggtgctttctgcttactgacttaggcaatacaccaagggcgagattttatatgcacatttctggatttttttatacggttttcattgacactcttccctcctcccacctgccaccaggcctcaccaaagcccactgccatggggccatctgggccattcagagactggagtgagatttgggtgtggagggggaggcgccaaggtggaggagcttcccactccaggactgttgatgaaagggacagattgaggaggaagtgggctctgaggctgcagggctggaagtccttgcccacttcccactctcctgccccaatctatctagtacttcccaggcaaataggcccctttgaggctcctgagtgccctcagatggtcaaaacccagttttccctctgggagcctaaaccaggctgcatcggaggccaggacccggatcattcactgtgataccctgccctccagagggtgcgctcagagacacgggcaagcatgcctcttcccttccctggagagaaagtgtgtgatttctctcccacctccttccccccaccagacctttgctgggcctaaaggtcttggccatggggacgccctcagtctagggatctggccacagactccctcctgtgaaccaacacagacacccaagcagagcaatcagttagtgaattgaatggaaataaacgctttagttataa

SEQ ID NO: 57539 - DNA, 2316 bp, Homo Sapiens
ctactccgagaggccccgggtccctctgccacaacttctgtcgctctgccgcctgcaccgtgacccgcactattcacgggagccctagagaggacaccgggacacccagaagccggggaatgatgtttcaggattcagtggcctttgaggatgtggctgtcagcttcacccaggaggagtgggctttgctggatccttcccagaagaatctctacagggatgtgatgcaggaaaccttcaagaacctgacctctgtaggaaaaacatggaaagttcagaacattgaagatgagtacaaaaatcccaggagaaatctaagtcttatgagagagaaactctgtgaaagtaaagaaagtcatcactgtggagaaagcttcaaccagattgcagatgacatgctgaacaggaaaactcttcctggaataacaccatgtgaaagcagtgtgtgtggagaagttggcacgggtcattcatctcttaatacgcatatcagagctgacactggacacaagtcatctgagtatcaggaatatggagagaatccatatagaaataaggaatgtaagaaagccttcagttatcttgactcctttcaatcacatgataaagcttgcactaaagagaaactctatgatggtaaagaatgtacagaaaccttcatttcccattcatgcattcaaagacacagggtaatgcacagtggagatggaccttataaatgtaagttttgtgggaaagccttctattttctcaatttatgtcttatccatgaacgaattcacactggtgtgaaaccatataagtgtaaacaatgtggtaaggcctttactcgttccactacccttccagtacatgaaagaactcacacaggagtgaatgccgatgaatgtaaagaatgtgggaatgcattcagttttcctagtgaaatccgtagacataaaaggtctcacactggagaaaaaccctatgagtgtaagcaatgtgggaaagtcttcatttctttcagttccattcagtatcataagatgactcacactggagagaaaccctatgaatgtaagcagtgtgggaaagcctttagatgtggctcacaccttcaaaagcatggaaggactcacactggagagaaaccctatgaatgtaggcaatgtggtaaagccttcagatgtacctcggaccttcaaaggcatgaaaagacacacactgaggataaaccctatggatgtaagcagtgtgggaaaggctttagatgtgcttcacaacttcaaattcatgaaaggacgcacagtggagagaaaccccatgaatgtaaggaatgtggaaaagtattcaagtatttttcttccttgcgtatacatgaaaggacgcacactggagagaagccccgtgaatgtaagcaatgtggaaaagcattcaggtatttctcttccttgcatatacatgaaaggacacacactggagataagccatatgagtgtaaggtatgtggcaaagccttcacttgttccagttccattcgatatcatgaaaggactcacactggagagaaaccctatgaatgtaagcactgtggtaaggcctttatttccaattacattcgatatcatgaaaggactcacactggagagaaaccctatcaatgcaagcaatgtggcaaagcctttattctgccagttcatgtcgagaacatgaaagaactcataccattaatagatgagaaatccttttagtggaagcaatgggagaagctttctgttgtcccacttcctttgaaacacaagaaaagagagtggtgaaagaacctctggataactgctttttgaattgagaagagagacttgcgataggacaataaaatctagaagaacttggatggtttcgtaatacaattcacctatagccaatcttgcatgagatttcaaaggcacagaaaaggaaggcatcagtcacatattagaggccccacacagggagagaggtgtgtggctacccgcttccagcccattttcctgattctttggcttgttaatcgagaatatcccccaaatcacttgtctctgttcctcagagttgtaggtctccagatatgtccccagtgctccacattaaagatacatgcccactttgctgtttcttcagaaatgttaaaatgtttaccagagaactaataaatgttgttatggctggaaatactcactgatgcccaactcttctatagattgagttggtttaagaggtctactttgtattgcaagcattgttgtttctacggattagcgagcctgttcttgattaaaccaactagatgggagcttg

SEQ ID NO: 57540 - DNA, 7253 bp, Homo Sapiens; identical to SEQ ID NO: 32232

SEQ ID NO: 57541 - DNA, 1866 bp, Homo Sapiens
cgttcctcggcgccgccggggccccagagggcagcggcagcaacagcagcagcagcagcagcgggagtggagatggcggcggcggcggctcaggggggcgggggcggggagccccgtagaaccgagggggtcggcccgggggtcccgggggaggtggagatggtgaaggggcagccgttcgacgtgggcccgcgctacacgcagttgcagtacatcggcgagggcgcgtacggcatggtcagctcggcctatgaccacgtgcgcaagactcgcgtggccatcaagaagatcagccccttcgaacatcagacctactgccagcgcacgctccgggagatccagatcctgctgcgcttccgccatgagaatgtcatcggcatccgagacattctgcgggcgtccaccctggaagccatgagagatgtctacattgtgcaggacctgatggagactgacctgtacaagttgctgaaaagccagcagctgagcaatgaccatatctgctacttcctctaccagatcctgcggggcctcaagtacatccactccgccaacgtgctccaccgagatctaaagccctccaacctgctcagcaacaccacctgcgaccttaagatttgtgatttcggcctggcccggattgccgatcctgagcatgaccacaccggcttcctgacggagtatgtggctacgcgctggtaccgggccccagagatcatgctgaactccaagggctataccaagtccatcgacatctggtctgtgggctgcattctggctgagatgctctctaaccggcccatcttccctggcaagcactacctggatcagctcaaccacattctgggcatcctgggctccccatcccaggaggacctgaattgtatcatcaacatgaaggcccgaaactacctacagtctctgccctccaagaccaaggtggcttgggccaagcttttccccaagtcagactccaaagcccttgacctgctggaccggatgttaacctttaaccccaataaacggatcacagtggaggaagcgctggctcacccctacctggagcagtactatgacccgacggatgagccagtggccgaggagcccttcaccttcgccatggagctggatgacctacctaaggagcggctgaaggagctcatcttccaggagacagcacgcttccagcccggagtgctggaggccccctagcccagacagacatctctgcaccctggggcctggacctgcctcctgcctgcccctctcccgccagactgttagaaaatggacactgtgcccagcccggaccttggcagcccaggccggggtggagcatgggcctggccacctctctcctttgctgaggcctccagcttcaggcaggccaaggccttctcctccccacccgccctccccacggggcctcgggagctcaggtggccccagttcaatctcccgctgctgctgctgctgcgcccttaccttccccagcgtcccagtctctggcagttctggaatggaagggttctggctgccccaacctgctgaagggcagaggtggagggtggggggcgctgagtagggactcagggccatgcctgcccccctcatctcattcaaaccccaccctagtttccctgaaggaacattccttagtctcaagggctagcatccctgaggagccaggccgggccgaatcccctccctgtcaaagctgtcacttcgcgtgccctcgctgcttctgtgtgtggtgagcagaagtggagctggggggcgtggagagcccggcgcccctgccacctccctgacccgtctaatatataaatatagagatgtgtctatggctgaaaaaaaaaaaaaaaa

SEQ ID NO: 57542 - DNA, 3408 bp, Homo Sapiens; identical to SEQ ID NO: 29525

SEQ ID NO: 57543 - DNA, 6050 bp, Homo Sapiens
ggcttccccacgggaggacgcgaggccccggcccagccatggccccctggcgcaaagctgacaaggagcggcacggcgtggccatatacaacttccaaggcagcggagccccccagctctccctgcagatcggcgatgtggtgcgaatacaggagacgtgtggagactggtataggggatacctcataaagcacaaaatgttacagggcatttttcctaagtcatttatccacatcaaggaagtgacagttgagaaaagaagaaatactgagaacatcattcctgcagaaattcctctggcacaagaagtgacaacgacactttgggaatggggaagcatctggaaacaactctatgtggccagcaaaaaggagcgttttctccaggtgcagtccatgatgtacgatctgatggagtggaggtcccagcttctctcaggaaccttacccaaggatgagctgaaggaactgaagcagaaagtcacgtccaaaattgactatggcaacaaaatccttgagcttgatttgattgtcagagatgaagacggaaatatcttggaccctgataataccagtgtcatcagcttgttccatgcacatgaggaagcaactgataaaatcacagagcgtatcaaagaagaaatgtcaaaagaccagccagattatgcaatgtattcccggatctcctcatcccccacccatagcctctatgtgtttgtgagaaactttgtgtgcagaattggggaagatgctgagctcttcatgtctctctacgaccccaacaagcaaacggtcataagtgagaactacctagtgcgatggggcagccggggcttccctaaggagattgagatgctcaacaatctgaaggtggtcttcacggatcttggaaacaaagacctcaacagggataaaatttacttgatttgtcaaatagtccgggtcggcaagatggatcttaaggatactggtgcaaagaagtgcacgcagggactgaggaggccctttggggtggcagttatggatataacagacatcatcaaggggaaagcagagagtgatgaagaaaagcagcacttcattccttttcacccggttacagctgagaatgacttcctacacagcctgctgggcaaagtcatagcctccaagggggacagtggagggcaaggcctctgggtgaccatgaagatgctggtgggtgacatcattcagattcgcaaggactatccacacctggtggacaggaccaccgtggtggccaggaagctgggattcccagagatcatcatgccaggggatgtcaggaacgacatctacattactctcttacaaggtgactttgacaagtacaacaagaccacacagaggaatgtggaagtcatcatgtgtgtgtgcgcggaggatggcaaaacgctgcctaatgcaatttgcgtgggagcaggggacaagcccatgaatgagtatcgctccgttgtgtactatcaagtcaaacagccacgctggatggaaacagtcaaggtggctgtccctattgaagacatgcagaggatccatctgcgattcatgtttcgacatcggtcatctctggaatctaaagataaaggagaaaagaactttgccatgtcctatgtgaagctgatgaaagaagatgggactactctacacgatggattccatgacttagttgtcctcaagggggacagcaagaagatggaggatgccagcgcatacctgacccttccttcttatcgacaccatgtggaaaacaagggggccacgctgagcaggagctccagcagtgttggggggctttctgtcagctcccgggatgtgttctccatttccaccctggtgtgctccacaaagctcactcagaatgtgggcttgctgggtttgctgaagtggcgtatgaagcctcaactgctacaggagaatttagaaaagttgaagattgtggatggagaggaagtggtgaagtttctccaggatactctggatgccctcttcaacatcatgatggagcattctcaaagtgatgaatatgacatcctcgtctttgatgccttgatttacataataggactcattgcagaccggaaatttcagcatttcaacaccgttctggaggcttacatccaacagcatttcagtgcgaccttggcttacaagaaattgatgacagtgctgaagacttacttggatacctccagcagaggggagcaatgtgagccaatcctaagaacgctgaaggctttggaatatgtgttcaagttcattgttcggtcgaggacattattttcacagctttatgaaggcaaagaacagatggagtttgaagaatccatgagacggctctttgaatccatcaacaatctgatgaaaagtcaatacaaaactaccatccttttgcaggtggcggctttgaaatacatcccatctgtcctgcatgatgtagaaatggtctttgatgcgaagttactcagccaactcctgtatgagttctacacctgcatccctcctgtgaaactccagaagcagaaagtacagtctatgaatgagatagtccagagcaacctctttaaaaagcaagaatgccgggacattctgcttcctgtcatcaccaaagagctgaaggagctgctggagcagaaggatgacatgcaacaccaggtcctggagaggaagtactgcgttgaattgctcaacagcatcttggaagtccttagctaccaggatgcggccttcacctaccaccatatccaagagatcatggtccagctgctgcggacagtgaaccggacagtcatcaccatgggccgggatcacattctgattagtcactttgtggcatgtatgacagccatcttaaaccagatgggtgaccagcactactccttctacattgagaccttccagaccagctctgaacttgtggacttcttgatggagaccttcatcatgttcaaggacctcattggaaagaacgtgtaccctggagactggatggccatgagcatggttcaaaacagggtcttcctgagagctatcaacaagtttgcagaaaccatgaaccagaagttcctagaacacacgaactttgagttccagctgtggaacaactattttcatctggcagtggcttttatcacccaggattctctgcagctggagcagttctcacacgccaaatacaacaaaatcctgaataagtatggggacatgagacggctaattggcttctccatccgtgatatgtggtacaagcttggtcagaacaaaatctgcttcatcccaggcatggtaggacctatattagagatgacacttatccctgaggctgagctccggaaagccaccataccaatcttcttcgacatgatgctgtgtgaatatcaaagaagtggggatttcaaaaagtttgaaaacgaaatcatcctgaagctggaccacgaggtagaagggggccgaggcgacgagcagtacatgcagctgctggagtcaatcctgatggaatgtgctgcagagcacccaaccattgccaagtcggtggagaacttcgtgaacctggtcaaaggcctcctggagaagctgctggattaccggggtgtgatgacagatgagagcaaagacaaccgcatgagctgcactgtgaacctgctgaatttctacaaagataacaacagggaggagatgtacataaggtacctgtacaaactccgcgatcttcacctggactgtgacaattacacagaggctgcctacacgctccttctccacacctggcttctcaagtggtcggatgagcagtgtgcatcacaggtcatgcagacaggccagcagcacccccagacacaccggcagctcaaggagacgctctacgagaccatcataggctactttgacaaaggaaagatgtgggaagaggccataagtctgtgcaaggagctggcggaacagtacgagatggagatctttgactatgagctgctcagccagaacctgatccagcaggcaaaattctatgaaagcatcatgaaaatcctcaggcccaaaccagactactttgctgttggatactacggccagggattcccctccttcctgcggaacaaagtgttcatctaccgcgggaaggaatatgagcgaagagaagatttccagatgcagctgatgacccagttccccaatgcagagaagatgaacaccacctctgccccgggagatgatgtgaagaatgccccaggccagtatatccagtgcttcactgtccagcctgtcttggatgaacatcccaggttcaagaataagccagtgcctgaccagattataaacttctacaaatccaactacgtgcaaaggttccactactcccggcccgtgcgcagggggaccgtagacccagagaatgagtttgcttccatgtggattgagagaacctccttcgtgactgcatacaagctgccggggatcctgcgctggtttgaggtggtgcacatgtcgcagaccacaattagtcctctggagaatgccatagaaaccatgtccacggccaatgagaagatcctgatgatgataaaccagtaccagagtgatgagaccctccccatcaacccactctccatgctcctgaacgggattgtggaccctgctgtcatgggaggcttcgccaagtatgagaaggccttcttcactgaagagtatgtcagggaccaccctgaggaccaggacaagctgacccacctcaaggacctgattgcatggcagatccccttcttgggagctgggattaagatccatgagaaaagggtgtcagataacttgcgacccttccatgaccggatggaggaatgtttcaagaacctgaaaatgaaggtggagaaggagtacggtgtccgagagatgcctgactttgacgacaggagagtgggccgccccaggtctatgctgcgctcatacagacagatgtccatcatctctctggcttccatgaattctgactgcagcacccccagcaagcctacctcagagagctttgacctggaattagcatcacccaagacgccgagagtggagcaggaggaaccgatctccccggggagcaccctgcctgaggtcaagctgcggaggtccaagaagaggacaaagagaagcagcgtagtttttgcggatgagaaagcagctgcagagtcggacctgaagcggctttccaggaagcatgagttcatgagtgacaccaacctctcggagcatgcggccatccccctcaaggcgtctgtcctctctcaaatgagctttgccagccagtccatgcctaccatcccagccctggcgctctcagtggcaggcatccctgggttggatgaggccaacacatctccccgcctcagccagaccttcctccaactctcagatggtgacaagaagacactcacacggaagaaggtcaatcagttcttcaagacaatgctggccagcaaatcggctgaagaaggcaaacagatcccagactcgctgtccacggacctgtgagctgctgctgactagggctgcatgggagagccagggaggggagtttctggaagaggaaagccatgcgtggaacatcgaagcctcagagagtgggagactgtccccatcagttgtccttacttagaggagacagagaggccaatcaggtcccagagctggagtgctaacaagcccagcatcccctggggctgtgatcatggtggatgaggaagcctcaacgtagattcctgaactcaaggtaccagcaagaatgccttctcccagtgtgctctccccaacatcctaggcacagctttcataacccagtttcttaggtgtaagaaactgcttttatctcatttattaagtctcagaacttaacagaaaaggaagccttttaaatattctttttaattttattttagattaacagttttgtactttacatttttttatacaaccaaccagtttcttttctagccaatcatctctgaagagttgctgtttcttactgacaataaaaaatgttctcttggttcg

SEQ ID NO: 57544 - DNA, 1488 bp, Homo Sapiens
gaggggcggggcggtgccggcaagatggctgcgcccgagaagatgacgtttcccgagaaaccaagccacaaaaagtacagggccgccctgaagaaggagaaacgaaagaaacgtcggcaggaacttgctcgactgagagactcaggactctcacagaaggaggaagaggaggacacttttattgaagaacaacaactagaagaagagaagctattggaaagagagaggcaaagattacatgaggagtggttgctaagagagcagaaggcacaagaagaattcagaataaagaaggaaaaggaagaggcggctaaaaaacggcaagaagaacaagagagaaagttaaaggaacaatgggaagaacagcagaggaaagagagagaagaggaggagcagaaacgacaggagaagaaagaaaaagaggaagctttgcagaagatgctggatcaggctgaaaatgagttggaaaatggtaccacatggcaaaacccagaaccacccgtggatttcagagtaatggagaaggatcgagctaattgtcccttctacagtaaaacaggagcttgcagatttggagatagatgttcacgtaaacataatttcccaacatccagtcctacccttcttattaagagcatgtttacgacgtttggaatggagcagtgcaggagggatgactatgaccctgacgcaagcctggagtacagcgaggaagaaacctaccaacagttcctagacttctatgaggatgtgttgcccgagttcaagaacgtggggaaagtgattcagttcaaggtcagctgcaatttggaacctcacctgaggggcaatgtatatgttcagtaccagtcggaagaagaatgccaagcagccctttctctgtttaacggacgatggtatgcaggacgacagctgcagtgtgaattctgccccgtgacccggtggaaaatggcgatttgtggtttatttgaaatacaacaatgtccaagaggaaagcactgcaactttcttcatgtgttcagaaatcccaacaatgaattctgggaagctaatagagacatctacttgtctccagatcggactggctcctcctttgggaagaactccgaaaggagggagaggatgggccaccacgacgactactacagcaggctgcggggaaggagaaaccctagtccagaccactcctacaaaagaaatggggaatccgagaggaaaagtagtcgtcacagggggaagaaatctcacaaacgcacatcaaagagtcgggagaggcacaattcacgaagcagaggaagaaatagggaccgcagcagggaccgcagccggggccggggcagccggagccggagccggagccggagccgcaggagccgccgcagccggagccaaagttcctctaggtcccgaagtcgtggcaggaggaggtcgggtaatagagacagaactgttcagagtcccaaatccaaataaactagttttgttctt

SEQ ID NO: 57545 - DNA, 4018 bp, Homo Sapiens
gttccgcccgccgctcttccagctgagactcggcagcggcggtcggagcggctgccacgccgcacctgcccgcgagggggcgcgccaggcccaggccgcagccgactgccgcgctctctgtccccgccctccgccatccccggactgcgctcacctgtctgggccgctggcctgggaggcgggggccggcgggagccaagccgaggaaagggcggagcggctctccgggcgcgtcatcggagcaccatggcggagctaggagctggcggcgacggccacaggggcggcgacggcgcagtgcgaagcgaaacagcacccgacagctacaaagtgcaagataagaaaaatgcctccagccgccctgcctctgcaatttcaggacaaaataacaaccactcaggaaataaaccagaccctccgcctgtgttacgtgttgatgaccggcagcggctggcccgggagcgacgtgaggaacgggagaaacagctagctgcaagagaaatagtgtggttagaaagagaagagcgagccaggcagcactacgagaagcacctggaagagcggaagaagaggttggaggagcagaggcagaaggaggagcggaggagggctgctgtggaggagaagcggaggcagagacttgaggaggacaaagaacgccacgaagctgttgtacggcgcacaatggaaaggagccagaagccaaaacagaagcataaccgttggtcgtggggaggctctctccatgggagccctagcatccacagtgcagatccagacaggcggtcagtttccaccatgaatctttcgaaatatgttgatcccgtcattagcaagcggctctcctcttcatctgcaactttactaaattctccagatagagctcgccgcctgcagctcagcccatgggagagcagcgttgttaacagactcctgacgcccacacattcgttcctggccagaagtaaaagcacagctgccttgtctggagaagcagcatcttgcagccccatcatcatgccctacaaagctgcacactctagaaattcgatggatcgaccaaaactctttgtaacaccacctgagggctcttctcgcaggaggatcattcatggcacagcgagctataaaaaagaaagagagagagaaaatgtactcttcctcacatctggcacccgaagggctgtatctccatctaatcccaaagcaagacaaccagctcgctcccgactttggcttccgtccaagtctcttcctcatttgcctggcacacccagaccgacatcctccttgccacccggctcagtcaaagctgctcctgctcaggtccggcccccatcccccggcaacatccgccctgtcaagagggaagtcaaagtggagcctgagaagaaagatcctgagaaggaacctcagaaagttgccaatgagccctcactaaagggcagagcacctttagtgaaggtagaagaagccacagttgaagagcggacacctgctgaaccagaagttggccctgctgctccagccatggccccagctccagcctcggccccagctccagcctcggccccagctccagccccggtccccaccccagccatggtctcagccccgtcatccactgtgaatgccagtgcttctgttaagacttctgcaggcaccaccgacccagaggaggccacaaggcttctagctgagaagaggcggctggcccgagagcagagagaaaaggaagaaagggagaggagggagcaggaagagcttgaaagacaaaagagagaggaattggctcaacgtgtggctgaagagaggacgactcgccgtgaggaggagtcgcgcaggctggaagccgagcaggcccgggagaaggaggagcagctgcagcggcaggcggaggagcgggcgctgcgcgagcgggaggaggcagagcgcgcccagaggcagaaagaagaagaagctcgcgttcgtgaagaagcagagagggtccggcaggaacgagagaagcatttccagagagaagagcaagagcgcctggagagaaagaagcgacttgaggagattatgaaaagaaccaggagaacagaagctacagataagaaaaccagtgatcagagaaacggtgatatagccaagggagctctcactggaggaacagaggtgtctgcacttccatgtacaacaaacgctccgggaaatggaaagccagttggcagcccacatgtggttacctcacaccagtcaaaagtgacagtggagagcactcccgatttggaaaaacaaccaaatgaaaatggtgtatctgttcagaatgaaaattttgaagaaattataaacttacccattggatctaaaccatccagattagatgtcaccaacagtgagagcccagaaattcctttgaatccaattttggcctttgatgatgaagggacacttgggcccctgcctcaggtagatggtgttcagacacagcagactgcagaagttatatgagtgtttcttctgaagaaccaaagctgaaatttaatgagaatttctacaattaatggaattcctttcctgctataaaggagcatcccctccacccgttttctagagttcttgaccatcattttgaaaagatttattaaaactagctaaagacaacagactggatagcttttctaataattttcatcaataggaaaaaagaaatacgtctcattcttcaatactttaaaatggctttttccagtgtgctccttcttagcaatcaatatttttctgcattctttaaaagacaagagaatttggttataaaagaaatgggctgactaggcatgatttttttggtcttaaaagcttaacatgtaaaattggcaaaaaaaattttttaccttttataatacttgaaaaataagtacctctttgttctacaagtagaatgaataggagaagagtttaagcctgtttttttaaaatattattgcaaagagctctatttgtagaagcaaattataggcagattaccaggttcttataaatacagcttgtacatggacattctgcaaacccagctgtcacatttttcttgcaactccttttgcaaaagcagactaaaatgttttaaaatgtgaaaaaacattattttttcaaagcaagaaaataatttactgccctcttacataatgtatttataaagtttttccagataaactaatcaaataaattagaataatgtgacaacattacaaatttaatttgttagctgcattccttctgatgttaccacgatagaatgttactgatgattcagggctatttctgaagtctgtatgttgctgctgtccccagtgatggtggacttatctttgccttacctgatcacaaattatgttggggaaaataaagatttaatatttctttaaatagaaaaagaatttggttttgctcgtttaagagcaatgagaaaatgatggaatgttgactgtgtttggcacacaggacacggaccttcatggaagtccttgctctgcgtggcatctgtcagcttttcacctttcattcttattcttcacttttgctgctgagcctagctgtacaaacttgcactttcatttgctaatataaattcagttttattttaccattttagagactactaatgattaaatgtagaaggagagggtgcacatgtttttatgtggagtgtttaaaagataaatttataccactgtaatgtgcagcttttattaaaagagaaattggttgaactgctaggttgaatgagagacttcatctattggactattttttttaatccaggcatatggtctttagtaatggcttgtaatttgtgaaaacattaatttgggggttttccctgttttcagttgtccatgtacacatagtcattatattagaaaagaaagctgttcaacaaacttgtttaatttgtttaaatcaacatagcatgaaacaccaaataaaatgtttgacatagttttaaaaaaaaaaaaaaaaaaaaaaaaaaaaa

SEQ ID NO: 57546 - DNA, 4413 bp, Homo Sapiens
agatccttccttctctcctccttcttcattctacaccacccccaacacatatccctgcaccccgcccattctttgctctctctcctttcttacacttaactccttcttgctccacagcctaacatgctgattaacaggaccccaaaggtttgggtgggtattaggggccttctcaacaaaagcagcacactcttgagcttgttcttccttttgttgccatctcagataaaaaggccccatgagggaggagacagataagtatagacttggtattctgataactctgtgttacatgggatcagatgtaaatgagttgtaccctgtggtgtttcatgctctgctgtgttgtcttctcatggtgagcttttctgtgcccttatttcatccagctctggtttctgtgtttcatgttatttctcctagcctctgtaaactctgcagcatactaataatgctctggctttctgattaaagataaatggcttactatcatcacccctggcttgagggccagctcacatgtaatcccttataggattccaaagttgttaaataaatgcagttctttttgtcattttgaagcattcaaaaatttttcaagaaaagctatgatcatataaatagaaattttatccagaatgttacagtgtagcatttgtgaataaatgtgtaggtgctgtatttgctcagactctagtttgggttgtgttttcttttccctttttttttttgagacggggtctctctctgtcatctgggctgcagtgcagtggtgtaatcacagctcactgcaacctctactcccaggctcaagcaatcctcctgagtagctgggactggagacatgcgccacaacgcccagctaatttttaggtttttctttcacatagacggggtctcactctgttggccaggctggtttcgaactcctggactcaagcagttccccccacctcagcctcctaaagtgctgggattacaggcctgagccaccatacccagcaagttatattttctttttccttatatagagtaaaataagggtgagtgaccgagaggttgatgcatagctagatcaccagtttaaatgccttcccacacacccctttcctcctgttccctccacctacaggttgtagatgagcatgagagtgtggagcagagttggcgagtgcaagtcgagcccatcaacctggacagctgtctccgtgctttcaccagtgaggaagagctaggggaagatgagatatactactgttccaagtgtaagacccactgctttagcaacaaagaagctggatctctggaggcttccacccttcctgattattcaccttaagcgatttcaatttgtaaatgatcagtggataaaatcacagaaaattgtcaaatttcctcgggaaagttttgatccgagtgcttttttggtaccacgagacccggctctctgccagcatcaaccactcacaccccagggggatgagctctccaagcccaggattctggcaagagaggtgaagaaagtggatgtgcagagtttggctggggaagaggacatgctcctgagcaaaagcccatcctcactcagcgctaacatcagcagcagcccaaaaggttctccttcttcatcaagaaaaagtggaaccagctgtccctccagcaaaaacagcagccctaatagctgcccacggactttggggaggagcaaagggaggctccggctgccccagattggcagcaaaaataaactgtcaagtagtaagaagaacttggatgccagcaaagagaatggggctgagcagatctgtgagctggctgatgccttgagtcgagggcatatgcgggggggcagccaaccagagctggtcactcctcaggaccacgaggtagctttgggcaatggattcctttatgagcatgaagcatatggcaatggctacagcaatggtcagcttggaaaccacagtgaagaagacagcactgatgaccaaagagaagacactcatattaagcctatttataatctatatgcaatttcatgccattcaggaattctgagtgggggccattacgtcacttatgccaaaaacccaaactgcaagtggtactgctacaatggcagcatctgtgaggaacatcaccctgatgaaattgacaccgactctgcctacattcttttctatgagcagcagaggatagactacgcacaatttctgccaaagattgatggcaaaaagatggcagacacaagcagtatggatgaagactttgagtctgattacgaaaagtactgtgtgttacagtaaagctaccactctggctgctagatagcttggtggggagggagatgactccttgtagctgatacttggcaaaagtgtcactgagaggcaagctaaatgtagttattttatcctgttagaatacaaattctaattaaaatagttaactttaagagtagtagtaattttattttgaagtctcatgcaagttgtctgatagagaactttcaggcagatcccaccattagcctgtaaacaaaaagtttggcaccagccacctgggaccaaataagaattcaattgtgcttgtccagatatgaacaaatatgtagtgagtatagagtttatcaataatcataacaaatattaaagatttccttggagtcaaagtaaaaaacaaaaaattgtaatgttgtctagggatgacatgatatgctacctcctttttcctgaagttttattccattctgttgacaagatggagaaagcaagatcatgaaggtgtgcaaatgattcttacggcatgggcgaggatttttcaatttattttttaaagtttccataccctttctttgtctttcttgctttttgtttttgccgttgtgtttatgtttgagatacaaccagtcattggtggcaggggcatagagtggtcagtctgaaagggaggctctcttaagagctatgtgccttccacccagagggagacccagtagaaagaaaaacatcctgggaaatccagctaccatggccctcccagtggaggcatcttacatttaggatacttcaggtatcctcagaaatgtattctgcaccccccggccccgcccatgctgagggaaggggagcagttgccaatatttgcaccatcttcacatgcacatgttgcaacaagagcttctgggaaggtaagcggcatcggagctagatcacgtttcacaattagtggtggttcttttccatgtttgttttgcactttaaaaaagagagaacacatgcaaatgaacttgcttgtgtgtatttgatggctccaagggctataaattacaaacaaaacacatcccagacattaggagttcataagtatatttaatgaaattggtggttttaggaagtcaactttagttttgctttgtttgcatgtccactaatttttttattttgatattagtcttttttaaaaaattttacagtagtcattgaaagttatgtttctttgtttacttcattttttcctctaaatattcaagactgggacaaaagtataaatattatttatttcaggtagaatttttttggtgtagttttttaatatatacttgaaggaaatgtttcaccttatttttggtctttgtttattcatttagaccctgcaagttgattctcattaattgtcagattccactacactttcttcctcataggtagtaattaccagtgtaactaagcatttgtgttctgatatctgaggccagtaactattaatatctagttctcagagcatttggaaaggttatcttaaatggctacctaaattgaaatccttttcagaaaaaatataattgcaaataggtaggagtggcctaaattatctaatgtaataaagtcagacaaaatgcatactttatagttcaagattttcggtatataaaatctgtcctttcctacctggacatgtcccattaaaaagtggaagattttaaataatttctttacagatgttttatttaagcaggtagcacaatctactaatgttgtttgatctgtgtttgttatactggttgtaattaatttttttaattcatgaactagcggaaaatttattaaattaactattaaccacattcaccttgtaaatgactgtataaaacttgttgacaatgcactgactttagaaagatgttaatgtgcataaatagagtgtaaataaaatagtgttgatgtactgaaatatgaactgtataaaaagtattagtaattgtatatggggtgtacctgtttatctgtaactgttatccaaacaaattaaatactgtggatgcctttaaaaaaaaaaaaaaaaaaaaaaaaaaaaaaaaaaaaaaaaaaaaaaaaaaaaaaaaaaaaaaaaaaaaaaaaaaaaaaaaaaaaa

SEQ ID NO: 57547 - DNA, 5327 bp, Homo Sapiens; identical to SEQ ID NO: 30229

SEQ ID NO: 57548 - DNA, 4357 bp, Homo Sapiens
cggccgcgtccaggcacaggccatgcagtgacgcccccccacccctccacctttgcccggacggcgggcagcagcccagcgcgccagccggccccggggcaggagcggtgctaggcaggggtggggtggccgggcccagggaccgggagccggggagggagccgggcaccgagcagagggcgggggaagcggcgccgaagtttgcctcggactcgccgggcgctgcggtggctccctgggccgaggactgttgctgccgctgccgccgccgcttcattgcacattcaagtggaaaattttcaggagtcagcagaaacattgtgtccaaaaaagactgagtcgcagttaccaccaaacccaggaggagactctccctggaaaacttcccttccctttcggtttattttcttgaaaaggctccaggcttcggcttggaaaatcccaccgccaaaattgagcccagcagctggagcggcagtgagagccctgccgaaaacatggaaaggatgagtgactctgcagataagccaattgacaatgatgcagaaggggtctggagccccgacatcgagcaaagctttcaggaggccctggctatctatccaccatgtgggaggaggaaaatcatcttatcagacgaaggcaaaatgtatggtaggaatgaattgatagccagatacatcaaactcaggacaggcaagacgaggaccagaaaacaggtgtctagtcacattcaggttcttgccagaaggaaatctcgtgattttcattccaagctaaaggatcagactgcaaaggataaggccctgcagcacatggcggccatgtcctcagcccagatcgtctcggccactgccattcataacaagctggggctgcctgggattccacgcccgaccttcccaggggcgccggggttctggccgggaatgattcaaacagggcagccaggatcctcacaagacgtcaagccttttgtgcagcaggcctaccccatccagccagcggtcacagcccccattccagggtttgagcctgcatcggccccagctccctcagtccctgcctggcaaggtcgctccattggcacaaccaagcttcgcctggtggaattttcagcttttctcgagcagcagcgagacccagactcgtacaacaaacacctcttcgtgcacattgggcatgccaaccattcttacagtgacccattgcttgaatcagtggacattcgtcagatttatgacaaatttcctgaaaagaaaggtggcttaaaggaactgtttggaaagggccctcaaaatgccttcttcctcgtaaaattctgggctgatttaaactgcaatattcaagatgatgctggggctttttatggtgtaaccagtcagtacgagagttctgaaaatatgacagtcacctgttccaccaaagtttgctcctttgggaagcaagtagtagaaaaagtagagacggagtatgcaaggtttgagaatggccgatttgtataccgaataaaccgctccccaatgtgtgaatatatgatcaacttcatccacaagctcaaacacttaccagagaaatatatgatgaacagtgttttggaaaacttcacaattttattggtggtaacaaacagggatacacaagaaactctactctgcatggcctgtgtgtttgaagtttcaaatagtgaacacggagcacaacatcatatttacaggcttgtaaaggactgaacatggttatttatatatatagatatctgtatatacacacacacatatgtgcacacacacactctctctccattatcgaacgactgactgtaaacctcaccacacagggtggtgccctggccccgaggtcaccccgacttttctaaatcttgtttgagtgaagtcattttttcatgtgttcatactatcattgtagctgtgaagttctggtacagttgtaaaaagagaaattgagttgtttctctatgttcttcagatgtgcagcccacaattcctcgggaaaggtgaacctgaacaacccaagtctctctctgcagagccctgtttctaattgtggtagaaaatattgagacagagcatttgccatgggacatttacagcctttatacaaatgtatttagttctcttttttccaacataaaattcttgttttaagatacaagtaaaattaatctttaaatataaatgtaaattagtacacaaaactaagaatctttagacttatctttgtaactaattagggtggaagttatgaaagaatgtaattcactaaattattttttaaatgaaacctttttttttctttttgaaaccaaatgttaaactatagccttaagaaatgcttggtagaagtgtcctaatgagacaaatttgtacttttatcctcaaggttaacactaatctcctaatccattaaactcttgaacaggtattacaaaggaagaaaacttcaccccttatccttaacatatatagtatatttaaaaaatataaaattgtattgtactaatgtgatgatggattatttaatgaaaaagaaaaaatggctctttttgcaataagtagatacatactgaaaaagtctaaacttacaatgtttatagtcttgtgtgtgcagttatattttatatggacgaccaaattttttattaagatgagtaaatatttgaaccactgaattttaataacaaaattttaaaattggcatgaatacggaatactgcactgtgagatgcaaagtatacagaatctgtggctgggagaaaatttcatcaaatagacaagtaaaaggctcatcagttttagcatctctgctccccagaaaattgtaagcatcctcaccagcctgtggatacattctttatttctagtgacccaatatgcatattaacctgctataactagggctatatgtgtaggtatgtgtatacatatacacaaatgcacatatagagttaacacatttagtgaacacttgtttagtgtcactcagtttgctaggtgctgatatgtacgtatatctcaatgtgtctgtagacttagatacatcctcttgaagcacatccatttctttagcgtctctcagtaagttacagtacttgtttgacttaggtttaagaggcccagctacctatctctgaccttttcaaataggctcatttgggagattcttttgccaggagagattcaactttccaatctaagtattccagagcattgcccaggcagagttggtttgatgtggccagatgttttgagttatttcccttaagtgtttcactggggagagaacagggagtgctcctccagcttcccaaagaaatatgtttttgtaagtggtaggaacatgtgcacacaatagaacatgaaataagttttttaacttgtaaaacatgtcaagatttttccaccaagctagaaaataaaaaacttagttctaccacatccaattaacttacacacccccttccctgtctcaacacctgctttgaccctgcttttctattattacatcagtcagcatcttgtggtccctaacatgaggatgtggctggctcgtgggaaacagcaaaacactaagcctgacctctcccaaattgggaagaccagaggagaaagtgcaaaactgtccccatttggaatgcccattccttctagaaaccagttggacagtgctcctctgcccttcataaacagactactgttgggtccctgattccaggctggcctgtgaaggattgccccaggtgtcccctttcacggttgtcacatttacagtgacttctgttgaacacccctcttagggatgtttcttttgctcttatttcctgcatctttccttaagggaagccccatcctctcccaggaccaggagtttatgaccaggcgagcacaaatggctaaaagccaagctgtcctagaacttcagtgggagagctgtctggttcatattctacccaggaatggtacttttcagtgcagccaggagggctcttgggatttcctttccaaagcacaaaaatactgggacccaagaagaacagctagaggacaactctgttggcacagagacggggacagcccagtctgctgacctcacagggtcagctgggcccccctggtgcttcaccacctgcatcctcttgctcagaatgcctttgcagttgagttttctgggtttctatgattgaccttgaggtttactccttgctcttacaacatttctaaggatttttaaaagtttacttcttgtcttgttcttctaaagctttctccaggacagatattttccctgtcttaaccactggtccagtcatcccagtgggcttctctttgtctctccc

SEQ ID NO: 57549 - DNA, 2398 bp, Homo Sapiens
ttgacatcgttcatgaagagcctctccacggctcctgcgcctgagacagctggcctgacctccaaatcatccatccacccctgctgtcatctgttttcatagtgtgagatcaacccacaggaatatccatggcttttgtgctcattttggttctcagtttctacgagctggtgtcaggacagtggcaagtcactggaccgggcaagtttgtccaggccttggtgggggaggacgccgtgttctcctgctccctctttcctgagaccagtgcagaggctatggaagtgcggttcttcaggaatcagttccatgctgtggtccacctctacagagatggggaagactgggaatctaagcagatgccacagtatcgagggagaactgagtttgtgaaggactccattgcaggggggcgtgtctctctaaggctaaaaaacatcactccctcggacatcggcctgtatgggtgctggttcagttcccagatttacgatgaggaggccacctgggagctgcgggtggcagcactgggctcacttcctctcatttccatcgtgggatatgttgacggaggtatccagttactctgcctgtcctcaggctggttcccccagcccacagccaagtggaaaggtccacaaggacaggatttgtcttcagactccagagcaaatgcagatgggtacagcctgtatgatgtggagatctccattatagtccaggaaaatgctgggagcatattgtgttccatccaccttgctgagcagagtcatgaggtggaatccaaggtattgataggagagacgtttttccagccctcaccttggcgcctggcttctattttactcgggttactctgtggtgccctgtgtggtgttgtcatggggatgataattgttttcttcaaatccaaagggaaaatccaggcggaactggactggagaagaaagcacggacaggcagaattgagagacgcccggaaacacgcagtggaggtgactctggatccagagacggctcacccgaagctctgcgtttctgatctgaaaactgtaacccatagaaaagctccccaggaggtgcctcactctgagaagagatttacaaggaagagtgtggtggcttctcagggtttccaagcagggaaacattactgggaggtggacgtgggacaaaatgtagggtggtatgtgggagtgtgtcgggatgacgtagacagggggaagaacaatgtgactttgtctcccaacaatgggtattgggtcctcagactgacaacagaacatttgtatttcacattcaatccccattttatcagcctcccccccagcacccctcctacacgagtaggggtcttcctggactatgagggtgggaccatctccttcttcaatacaaatgaccagtcccttatttataccctgctgacatgtcagtttgaaggcttgttgagaccctatatccagcatgcgatgtatgacgaggaaaaggggactcccatattcatatgtccagtgtcctggggatgagacagagaagaccctgcttaaagggccccacaccacagacccagacacagccaagggagagtgctcccgacaggtggccccagcttcctctccggagcctgcgcacagagagtcacgccccccactctcctttagggagctgaggttcttctgccctgagccctgcagcagcggcagtcacagcttccagatgaggggggattggcctgaccctgtgggagtcagaagccatggctgccctgaagtggggacggaatagactcacattaggtttagtttgtgaaaactccatccagctaagcgatcttgaacaagtcacaacctcccaggctcctcatttgctagtcacggacagtgattcctgcctcacaggtgaagattaaagagacaacgaatgtgaatcatgcttgcaggtttgagggcacagtgtttgctaatgatgtgtttttatattatacattttcccaccataaactctgtttgcttattccacattaatttacttttctctataccaaatcacccatggaatagttattgaacacctgctttgtgaggctcaaagaataaagaggaggtaggatttttcactgattctataagcccagcattacctgataccaaaaccaggcaaagaaaacagaagaagaggaaggaaaactacaggtccatatccctcattaacacagacacaaaaattctaaataaaattttaacaaattaaactaaacaatatatttaaagatgatatataactactcagtgtggtttgtcccacaaatgcagagttggtttaatatttaaatatcaaccagtgtaattcagcacattaataaagtaaaaaagaaaaccataaaaaaaaaaaaaaa

SEQ ID NO: 57550 - DNA, 1303 bp, Homo Sapiens
gaagagacagcgccgccggccgtggggagcggacgcagtgatttgctccccctcgtgcagcaacccccacacccagcaccaggagcctgttcctctcacgccctcacctggctgagccgcagtagttcttcagtggcaagctttatgtcctgacccagctaaagctgccagttgaagaactgttgccctctgcccctggcttcgaggaggaggaggagctgctttccccatcatctggaaggtgacagaaatgggctgggaaggtccgaacagcagggtggatgatacgttttgggcaagttggagagcctttgcccagattggcccagcaaggagcggttttagattagagacactggctggattgaggagtagaaggctcaaacaacccaaggctttctgcctccgagatgtggcaccatagtgcggtgccctgtggcttcaccgccctacttccacctccgcccagcctgtaatgtttatataagcagcctcaaggaccaagaaccatctgcgaaaggacacacacaggaaattcataaaagaaatctgaatggataaaaccatgaaaaaaagtatgcttcattagtaattaaagaaaggcaaatagagctggaagcatttttcccttagcaaaccataacagaaaaaaataagacccaatattggcaaagagactactgaaaaaacattcccatacattgcgtgtgggagtatacatcggtgcaggcttcctggatgacagttgggtgatatgtgtcatgtggcctaaaagcctccatgtcatttgacctacgaattctatctttgggaatttatcctaagaaaatacttaaggatttagttagtgataagatgttcatcccagcattgcaatggagaaaaatgggaagcaatggtttggttgggaatttattccttttctgctgtaacgaaagtttgcaataggggattgcttaagtaaattattgtatctccatccagatggtggagtaccgcgcagacattaaaagtcatgtaaaagaacatctgactgaaagaaaaatgctccttgaatattaaaaggttgtaaaaatagtgcatgttatgtgatttcaattttgttttttaaaatatgggtgtatgcttgtatacgtagagcagataaaaaagacggaaggcatactaaaaaatgttgagtggttatctttgtatggtggaacaaagtcactgtaattttcatctttggtttttctgtaatttccaaattttccacattttgtatttcatataatataatttaagaaaaaaaaaaaaaaaaaaa

SEQ ID NO: 57551 - DNA, 3052 bp, Homo Sapiens; identical to SEQ ID NO: 29111

SEQ ID NO: 57552 - DNA, 2627 bp, Homo Sapiens
tctaaattttatgtctggtaatggacttgtatatgtaaagaactcttataattgaataataaaagggcaaatagcccaactgaagagggcaaaggatctgaataggcatttctgcaaaacacatgaaaagaagctcaacatcattagccatcagggaaatgatttcacttaatgcccacaaggatggctataatcagaacgagaagacagtaacaagtgttcacaaggatatggagaaatgggaacgttggaactgtcatatgttgctgtgagaatgtaaaatggtgcagccgttttggaaaatagcctggcatttcttcaaggttaaatgtagaattaacacgtgactcagcagttccatttctgggtttatacccaagagaaatgaaaatatatgtccacagaaaaacttgtacatggatgttcatagcagcagcatccataatagcctcaagtagaagcaactcaaatgtctgtcaactgatgaacagatgacaaaacatggtacaatggaatattactcagcaatgaaaaggaatgctttatatgttacaacatgattggaccctaaaaacatgccaaaaggctgtgtattatatgactccattgataggaaaggaatggtttacatgttacaacatgattgaaccttaaaaacatgccacaaactgtgtatgactccattgatatgagaggaatggtttacatgttacaacatgattgaaccctaaaaacatgtattatatgactccatttatatgaaatgtctcaaagaggcagattcatagaaagactagtggttgccaaggtcttcattttttaggggtgcactaatggatgtaggatttctttttagagtgattaaaatgttacaaaattgctggctgggtgcagtggcttatgcccataatcacagcacttcgggaggctgaagtgggaagatccaggagttgaagaccagcctgggcaacatagtgagaaaatgtctccctaaaaggaagaattaacctcatgtggtggtgtgcacctgtagttctagctactagggaggctgaggaggaaggattgcttatcccgggaattcaaggttgcagtgagctatgattgcacccactgtacctcatcctgagagagagagcaagaccctgtctctaaaagaaaaataaatgttctgaaattgattatgttgacggtcacataactgaatatattaaaaacttaaattgtatactttaagttggtgattgtatgatatatgagttttatcaatacagctacttaaaaacctatagttatgcaaattaaaaatttcatttactggggataattgaaatgattataccgaacataatacatgtagaaacagtatagtttttgtattgctggatagtctgtttttttctttttcaatatttgaaactaaaggtcatgtaattgatgtttttcttacataactgtgaaatatttattctctgttgaaatgttttatcttacgttttctcctttaggaatgttacgttcataacttactaaggattagtgtatattttccaaccttgaggcatgaaattctggagcttattattgaaaaactactcaagctggatgtgaatgcatcccggcagggtattgaagatgctgaagaaacagcaaatcaaacttgtggtgggacagattccacggaaggattgtttaatatgggattcgcagaggcatttttggaacatctttggaaaaacttgcaggatccaagtaatcctgccatcatcaggcaggctgctggaaattatattggaagctttttggcaagagctaaatttatttctcttattactgtaaaaccatgcctagatcttttggttaactggctgcacatataccttaataaccaggattcgggaacaaaggcattctgcgatgttgctctccatggaccattttactcagcctgccaagctgtgttctacacctttgtttttagacacaagcagcttttgagcggaaacctgaaagaaggtttgcagtatcctcagagtctgaattttgagcggatagtgatgagccagctaaatcccctgaagatttgcctgccctcagtggttaacttttttgctgcaatcacaaagatgaagacttgtggatatggatggtggtgatggttgcacaacaatatcaatttattttataccactgaaccgtgcacttcaaaatggttaagatggtaagttttatgttgtgtattttaccataataaaaaaaattgtagagggaaaaacagtctgcctccacttttgatatgggactgctaacatcttccaccctccctctccccctctgccccacatctgggcaagctaagaaagcctgctgctctctcctctggcaccagctggaaattcatacccaacaagccctagccctcccaccagacccacatttcatccccatccccatcgcatccccatccccatccccatccctaaccaccataaatgctaagggagtttccttgcctggttttctgaaaccatttttggacctgcttgggaatctgccctgctctctcagaaagcttcattatatgagcaataaaccttttcctaccctcaaaaaaaaaaaaaaaaaaa

SEQ ID NO: 57553 - DNA, 3008 bp, Homo Sapiens
cgttgatgctggggatgttcgtgctgcagctcggcgtcttgtccacctttttgtccgagcctgtggtcaaggcgctgaccagcggggccgcgctgcacgtgctcttgtcccagctgccgagcctcttggggttgtccctcccgcgccagatcggctgcttctctctcttcaagacgctggcctccttgctgactgcgctgcctcggagcagtccggccgaactgaccatctccgcgctcagtctggcgctgctcgtgccggtcaaggaattgaacgtgagattccgagaccggctacccacgccgatcccgggggaagtcgtcttggtgcttctggcctccgtgctctgcttcacctcttctgtggacacaagataccaagtccagatagtggggctgttgcctggagggtaagagaatgaaaagatgccagctttctcttctcccacctctcccacccaacactccctcttatctccaccccccattttctctgccttccttatctcactgaagcacctaacccctcctcaccatggatccctccctctccagatttccccaacccctcctccccaacctggctgagctgcccaggattctggctgactcgctgcccattgcactggttagttttgcggtgtctgcctccctggcctccatccatgcagacaagtatagctacactattgactccaaccaggtgggactctgactgtggaccccaaccctctcatttgacttcccaccatgcctttgtctctcccacttcatctcactgtatccctccaggagttcctggcacatggtgcctccaacctcatctcctccctcttctcttgctttcccaactcggctacgctggccaccaccaatctactggtggatgctggtgggaaaacacaggtaagagggcatccttggatgaggagaaaggatgggccatccaggcaaggtggcggtggtggagaaacaggtggaagatggctagaatcccaggtggcacctatatagagaagactggggatctgtgagaaagggtgactgaggggatggaattatagataggagagatggaagataacaatgttccagtaagacctttgtaggctctaagcgctgaaaaagtttatggtgccccaggtgtggttcaaaataaaaacacaaaactataaaataaacttaagagataaaattcttatttttttcacacaatgacattgtcttttaaaaggaatatcacatatcaaagtctccccctaatatttttggtttcccgtactttgctggtgccctaaacacatataccctgcttatagggtaacccaacagtggcttttaaggtggaggtgggctacaaaactggggaacttgaacaatggacatctacaaggagactggtgaataatgggcatttaattaattggggggagcgggagggttagatgtgaatggcagaatattaagaagggggttgtgtggaaggagatttgggagaagggagacttccgaggaagattaggcagagtgggcaggaagaccagctctcatgtgggggtgggaggctctcttcctttttttgctcctgttcctccttttctctagctggcaggcctcttctcctgcacagtggtcctgtcggtgctgctgtggctggggcccttcttttactatctgcccaaggtaaggagcagaggaggcatgagcatggctgggaggggtagctgtattccaggtcatcgaggtagtcagcccacctcctctgcctcaaggctgtcctggcttgcatcaacatctccagcatgcgccaggtgttctgccagatgcaggaacttccacaactatggcacatcagccgagtggactttgtgagaaatgccattacccccagattgccccctctcatcttgttagcatccccagcctctgccctgaaccaaacctaattgtcctggtcttaagttctgcaacccacccactcccccagcaaacataactcctagtatgctttactcacaggcaagggaaaggatggggtttgaacccctttggcctgaatatttgtaacttcccaactggtgcgggtcattacatttggtgtgtgtcccattgaatcaaccctgttgtttccttctgtcatgctttccacttcttcctggatcatctctccccatcacttgccttggtagtcactgccctggatctctttacccagcagtgatggcctggcttttcttttgggcaatccacccctatccctatcctgcaggctgtgtggatggacacctgggtggcagtagtgaccctgagtgtggatttgggcctggctgtgggtgtggtcttctccatgatgactgtggtctgccgcacccggagctcctccaggtcccggggctctgcatcctgagctatccaacaccactgtactttgggacccgtgggcagtttcgctgcaacctggagtggcacctggggctcggagaaggagaaaaggagacttcaaagccagatggcccaatggttgcagttgctgagcctgtcagggtggtggtcctagacttcagtggtgtcacctttgcagatgctgctggggccagagaagtggtgcagctggccagccgatgtcgagatgctgggatccgcctcctcctggctcagtgtaatgccttggtgcaggggacactgacccgggtaggactcctggacagggtgactccagatcagctgtttgtgagtgtgcaggatgcagctgcttatgccctggggagcctggtaaggggcagtagcaccaggagcgggagccaggaggcactgggctgcggcaagtgaggcaggggagctcactgacccaaagatttgcaccgtgtgggtctgacctcatcatgtggagtgcagagggccctgatgacatgtgtgtgatgaggaccatgacccttgaacccccttacctaacgtaactaataaaatgaagctgagagctttggaatccaaaaaaaaaaaaaaaaaaaa

SEQ ID NO: 57554 - DNA, 2113 bp, Homo Sapiens
tcttcactactctgtgtcctgtgctcctacaggcccagcctctgtggccctgtgacctgcaggtattgggagatccacagctaagacaccaggacccctggaagcctagaaatgggaccattgcaatttagagatgtggccatagaattctctctggaggagtggcattgcctggacactgcacagcggaatctatataggaatgtgatgttagagaactacagtaacctggtcttccttggtattgttgtctctaagccagacctgatcgcccatctggagcaaggaaaaaaacctttgactatgaagagacatgagatggtagccaacccctcagttatatgttctcattttgcccaagatctttggccagagcagaacataaaagattctttccaaaaagtgatactgagaagatatgaaaaacgtggacatggaaatttacagttaataaaaaggtgtgaaagtgtagatgagtgtaaggtgcacacaggaggttataatggacttaaccagtgtagtacaactacccagagcaaagtatttcaatgtgataaatatgggaaagtctttcataaattttcaaattcaaatagacataatataagacatactgaaaaaaaacctttcaaatgcatagaatgtggcaaagcttttaaccagttctcaacccttataacacataagaaaattcatactggagagaaaccctacatttgtgaagaatgtggcaaagcctttaagtactcctctgcccttaatacacataagagaattcatactggagagaaaccatacaagtgtgataaatgtgacaaagcctttattgcatcctcaacccttagtaaacatgagatcattcatactggaaagaaaccctacaagtgtgaagaatgtggcaaagcttttaaccaatcctcgacacttactaaacataagaaaattcatactggagagaaaccctacaaatgtgaagaatgtggcaaagcttttaaccaatcctcaacacttactaaacataagaaaattcatactggagagaagccctacgtttgtgaagaatgtggcaaagcctttaagtactcccgtatccttactacacataagagaattcatactggagagaaaccatacaagtgtaataaatgtggcaaagcctttattgcatcctcaacccttagtagacatgagttcattcatatgggaaagaaacattacaaatgtgaagaatgtggcaaagccttcatttggtcctcagtcctaactagacataagagagttcatactggagagaagccctacaaatgtgaagaatgtggcaaagcctttaagtactcctctacccttagttcacataagagaagtcatactggagagaaaccctacaaatgtgaagaatgtggcaaagcctttgttgcatcctcaacccttagtaaacatgagatcattcatactggaaagaaaccctacaagtgtgaagaatgtggcaaagcttttaaccagtcctcatcccttactaaacataagaaaattcatactggagagaaaccctacaaatgtgaagaatgtggcaaagcttttaaccagtcctcttcccttactaaacataagaaaattcatactggagagaaaccctacaaatgtgaagaatgtggcaaagcttttaaccagtcctcaacccttattaaacataagaaaattcatactagagagaaaccctacaaatgtgaagaatgtggcaaagcttttcacctatccacacaccttactacacataagatacttcatactggagagaaaccttatagatgtagagaatgtggcaaagcttttaaccattctgcaaccctttcttcacataagaaaatccattctggagagaaaccatacgagtgtgataaatgtggcaaagcctttatttcaccctcaagccttagtagacatgagataattcatactggggagaaaccctagaagtgtgaagaatgtggcaaagccttcaagtggtcctcacaccttactatacactgagagttctgaacttactctgtaaccatcccaaactcctcccaggcacagtctggcagaggtcctgccatttcggagacctgga

SEQ ID NO: 57555 - DNA, 7248 bp, Homo Sapiens; identical to SEQ ID NO: 23393

SEQ ID NO: 57556 - DNA, 5823 bp, Homo Sapiens; identical to SEQ ID NO: 31555

SEQ ID NO: 57557 - DNA, 4312 bp, Homo Sapiens
cgaccgcggcggctggaaccctgattgctgtccttcaacgtgttcattatgaagttattagtaatacttttgttttctggacttataactggttttagaagtgactcttcctctagtttgccacctaagttactactagtatcctttgatggcttcagagctgattatctgaagaactatgaatttcctcatctccagaattttatcaaagaaggtgttttggtagagcatgttaaaaatgtttttatcacaaaaacatttccaaaccactacagtattgtgacaggcttgtatgaagaaagccatggcattgtggctaattccatgtatgatgcagtcacaaagaaacacttttctgactctaatgacaaggatcctttttggtggaatgaggcagtacctatttgggtgaccaatcagcttcaggaaaacagatcaagtgctgctgctatgtggcctggtactgatgtacccattcacgataccatctcttcctattttatgaattacaactcctcagtgtcatttgaggaaagactaaataatattactatgtggctaaacaattcgaacccaccagtcacctttgcaacactatattgggaagaaccagatgcaagtggccacaaatacggacctgaagataaagaaaacatgagcagagtgttgaaaaaaatagatgatcttatcggtgacttagtccaaagactcaagatgttagggctatgggaaaatcttaatgtgatcattacaagtgatcatgggatgacccagtgttctcaggacagactgataaacctggattcctgcatcgatcattcatactacactcttatagatttgagcccagttgctgcaatacttcccaaaataaatagaacagaggtttataacaaactgaaaaactgtagccctcatatgaatgtttatctcaaagaagacattcctaacagattttattaccaacataatgatcgaattcagcccattattttggttgccgatgaaggctggacaattgtgctaaatgaatcatcacaaaaattaggtgaccatggttatgataattctttgcctagtatgcatccatttctagctgcccacggacctgcatttcacaaaggctacaagcatagcacaattaacattgtggatatttatccaatgatgtgccacatcctgggattaaaaccacatcccaataatgggacctttggtcatactaagtgcttgttagttgaccagtggtgcattaatctcccagaagccatcgcgattgttatcggttcactcttggtgttaaccatgctaacatgcctcataataatcatgcagaatagactttctgtacctcgtccattttctcgacttcagctacaagaagatgatgatgatcctttaattgggtgacatgtgctagggcttatacaaagtgtctttgattaatcacaaaactaagaatacatccaaagaatagtgttgtaactatgaaaaagaatactttgaaagacaaagaacttagactaagcatgttaaaattattactttgttttccttgtgttttgtttcggtgcatttgctaataagataacgctgaccatagtaaaattgttagtaaatcattaggtaacatcttgtggtaggaaatcattaggtaacatcaatcctaactagaaatactaaaaatggcttttgagaaaaatacttcctctgcttgtattttgcgatgaagatgtgatacatctttaaatgaaaatataccaaaatttagtaggcatgtttttctaataaatttatatatttgtaaagaaaacaacagaaatctttatgcaatttgtgaattttgtatattagggaggaaaagcttcctatatttttatatttacctttaattagtttgtatctcaagtaccctcttgaggtaggaaatgctctgtgatggtaaataaaattggagcagacagaaaagatatagcaaatgaagaaatattttaaggaaacctatttgaaaaaaaaagcaaagaccatttgataaaagcctgagttgtcaccattatgtcttaagctgttagtcttaaagattattgttaaaaaattcagaagaaaagagagacaagtgctcttctctctatctatgcttaatgcctttatgtaagttacttagttgtttgcgtgtgcctgtgcaagtgtgtttgtgtgtggttgtgtggacattatgtgatttactatataaggaggtcagagatggactgtggccaggcttccacattcctgaagcacacagatctcaggaaaggttatttttgcacttcatatttgtttactttctcctaactcacaagttaaaatcataacttaatttcattaacttttatcatttaactctctcatgtttgttgtaacctgaggtatccaaatgctacagaaaaatttatgacccaaatacaaatctcaatttgactgggacagaatgaggaatggagatttttgtatttatctttgggactttatgccttactttttaggctatagaatagttaagaaattttaaacaaaatttagtatcttttggtctttcacaccattcatatgttaagtggcagaatagccttagtgctacctccactttttttctccagtatttgcatcacagaaataatccctctgtttaacatgtttgttcagagccaagggtttattgtgaagaactgtcatcctgcctttgctagctggtaccttctagtaatcaaaattaatatgaagaaactaggttgtgacagactagattatatttagtaggggaaaaattgggctcaagaaccattcatcagtacgtgagacaagcagttaatagtatgatctttaaagttttgacaatataaaataaacttggtaactgttttacaaatataaaagtataataaatatgcagcccagttaaatattgattatctgtgatggtaaagaacaacagtggtgccagtcatcaaacatacagtgcgtcctattgagtcactgctaatttcttgagcctggtatttgctgcctattgtatttgtggttgttgagaggcattttcaaaccctgtataaataatccatgctgttggtcataagttaactgtattaagaacagtaaaataaataaaaaccaatagtactaattttgctttaaaaaaatttctaatttttttcacataaaacaattatcctaaaggttaatagttgatcgaaacagaataatagaaaaattctactttaatttccattaaaaagcaaatagcattgacacatttaaagcttttcatttaaagtagtggatgtttttgaagtatctaaaatagtagcagaatattttatacttggtccttgcaatggtgtgagttttaatgattgcattatcgtgattggtggttatgagtttcagaaatctatacttggcatccaactcatgagtggattttatataggatggaacaggaaggtatgtcctgtcagtatcttaaccctttcaacaagacatttacctatttgtctttccttacgttctcaaaatattaactcgaattgtaaattaagcaaaaatttaaaaagtatatgttgatgggacaagaagaatagtatttatttaataaaacatatattatattgaactatgtgttaattcatttgtatcttttaaaaaattatcactgttaaagccattgactcctttagtacactgagaaaaatcttatagtaaaactagcctttcacattaaggttttggtgtgtattttgttaaataactaacatgctgctctattttctgggtgtagaaagtatttggctctaggaaacatttacttgtttgtgaaaacaataccccaaggtaataggaaaagtttgagttaagtgtttttaattcagtcagtgaattcagaataagtacattcatgtataacatagggacagttctgctgctgttatttatatgcaattcttctggtaaatagcaatagaataaaacatatttcaatgtttgtgtataggttttatattattattccactaggaatggcataagaatttatagataaattcttgtaacattaaaggattaaaatgtttttacattgtttttgggtgtctccttcttgtgcccatatctgataagctttatggattattgcatttaattccttttatttggagggttttacttccttgttaacatataaagttataaatgaaggacaaggaggagatggaaaatgtgtatttattgttaattcttaaaatagtgtgtaaataaaataacatcagtgtgcttt

SEQ ID NO: 57558 - DNA, 5595 bp, Homo Sapiens
gtcgccagcaaccgagcggggcccggcccgagcggggcctgggggtgcgacgccgagggcgggggagagcgcgccgctgctcccggaccgggccgcgcacgccgcctcaggaaccatcactgttgctggaggcacctgacaaatcctagcgaatttttggagcatctccacccaggaacctcgccatccagaagtgtgcttcccgcacagctgcagccatggggtctgaggaccacggcgcccagaaccccagctgtaaaatcatgacgtttcgcccaaccatggaagaatttaaagacttcaacaaatacgtggcctacatagagtcgcagggagcccaccgggcgggcctggccaagatcatccccccgaaggagtggaagccgcggcagacgtatgatgacatcgacgacgtggtgatcccggcgcccatccagcaggtggtgacgggccagtcgggcctcttcacgcagtacaatatccagaagaaggccatgacagtgggcgagtaccgccgcctggccaacagcgagaagtactgtaccccgcggcaccaggactttgacgaccttgaacgcaaatactggaagaacctcacctttgtctccccgatctacggggctgacatcagcggctctttgtatgatgacgacgtggcccagtggaacatcgggagcctccggaccatcctggacatggtggagcgcgagtgcggcaccatcatcgagggcgtgaacacgccctacctgtacttcggcatgtggaagaccaccttcgcctggcacaccgaggacatggacctgtacagcatcaactacctgcactttggggagcctaagtcctggtacgccatcccaccagagcacggcaagcgcctggagcggctggccatcggcttcttccccgggagctcgcagggctgcgacgccttcctgcggcataagatgaccctcatctcgcccatcatcctgaagaagtacgggatccccttcagccggatcacgcaggaggccggggaattcatgatcacatttccctacggctaccacgccggcttcaatcacgggttcaactgcgcagaatctaccaacttcgccaccctgcggtggattgactacggcaaagtggccactcagtgcacgtgccggaaggacatggtcaagatctccatggacgtgttcgtgcgcatcctgcagcccgagcgctacgagctgtggaagcagggcaaggacctcacggtgctggaccacacgcggcccacggcgctcaccagccccgagctgagctcctggagtgcgtcccgggcctcgctgaaggccaagctcctccgcaggtctcaccggaaacggagccagcccaagaagccgaagcccgaagaccccaagttccctggggagggtacggctggggcagcgctcctagaggaggctgggggcagcgtgaaggaggaggctgggccggaggttgaccccgaggaggaggaggaggagccgcagccactgccacacggccgggaggccgagggcgcagaagaggacgggaggggcaagctgcggccaaccaaggccaagagcgagcggaagaagaagagcttcggcctgctgcccccacagctgccgcccccgcctgctcacttcccctcagaggaggcgctgtggctgccatccccactggagcccccggtgctgggcccaggccctgcagccatggaggagagccccctgccggcaccccttaatgtcgtgccccctgaggtgcccagtgaggagctagaggccaagcctcggcccatcatccccatgctgtacgtggtgccgcggccgggcaaggcagccttcaaccaggagcacgtgtcctgccagcaggcctttgagcactttgcccagaagggtccgacctggaaggaaccagtttcccccatggagctgacggggccagaggacggtgcagccagcagtggggcaggtcgcatggagaccaaagcccgggccggagaggggcaggcaccgtccacattttccaaattgaagatggagatcaagaagagccggcgccatcccctgggccggccgcccacccggtccccactgtcggtggtgaagcaggaggcctcaagtgacgaggaggcatcccctttctccggggaggaagatgtgagtgacccggacgccttgaggccgctgctgtctctgcagtggaagaacagggcggccagcttccaggccgagaggaagttcaacgcagcggctgcgcgcacggagccctactgcgccatctgcacgctcttctacccctactgccaggccctacagactgagaaggaggcacccatagcctccctcggagagggctgcccggccacattaccctccaaaagccgtcagaagacccgaccgctcatccctgagatgtgcttcacctctggcggtgagaacacggagccgctgcctgccaactcctacatcggcgacgacgggaccagccccctgatcgcctgcggcaagtgctgcctgcaggtccatgccagttgctatggcatccgtcccgagctggtcaatgaaggctggacgtgttcccggtgcgcggcccacgcctggactgcggagtgctgcctgtgcaacctgcgaggaggtgcgctgcagatgaccaccgataggaggtggatccacgtgatctgtgccatcgcagtccccgaggcgcgcttcctgaacgtgattgagcgccaccctgtggacatcagcgccatccccgagcagcggtggaagctgaaatgcgtgtactgccggaagcggatgaagaaggtgtcaggtgcctgtatccagtgctcctacgagcactgctccacgtccttccacgtgacctgcgcccacgccgcaggcgtgctcatggagccggacgactggccctatgtggtctccatcacctgcctcaagcacaagtcggggggtcacgctgtccaactcctgagggccgtgtccctaggccaggtggtcatcaccaagaaccgcaacgggctgtactaccgctgtcgcgtcatcggtgccgcctcgcagacctgctacgaagtgaacttcgacgatggctcctacagcgacaacctgtaccctgagagcatcacgagtagggactgtgtccagctgggacccccttccgagggggagctggtggagctccggtggactgacggcaacctctacaaggccaagttcatctcctccgtcaccagccacatctaccaggtggagtttgaggacgggtcccagctgacggtgaagcgtggggacatcttcaccctggaggaggagctgcccaagagggtccgctctcggctgtcactgagcacgggggcaccgcaggagcccgccttctcgggggaggaggccaaggccgccaagcgcccgcgtgtgggcaccccgcttgccacggaggactccgggcggagccaggactacgtggccttcgtggagagcctcctgcaggtgcagggccggcccggagcccccttctaggacagctggccgctcaggcgaccctcagcccggcggggaggccatggcatgccccgggcgttcgcttgctgtgaattcctgtcctcgtgtccccgacccccgagaggccacctccaagccgcgggtgccccctagggcgacaggagccagcgggacgccgcacgcggccccagactcagggagcagggccaggcgggctcgggggccggccaggggagcaccccactcaactactcagaattttaaaccatgtaagctctcttcttctcgaaaaggtgctactgcaatgccctactgagcaacctttgagattgtcacttctgtacataaaccacctttgtgaggctctttctataaatacatattgtttaaaaaaaagcaagaaaaaaaggaaaacaaaggaaaatatccccaaagttgttttctagatttgtggctttaagaaaaaacaaaacaaaacaaacacattgtttttctcagaaccaggattctctgagaggtcagagcatctcgctgtttttttgttgttgttttaaaatattatgatttggctacagaccaggcagggaaagagacccggtaattggagggtgagcctcggggggggggcaggacgccccggtttcggcacagcccggtcactcacggcctcgctctcgcctcaccccggctcctgggctttgatggtctggtgccagtgcctgtgcccactctgtgcctgctgggaggaggcccaggctctctggtggccgcccctgtgcacctggccaggggaagcccgggggtctggggcctccctccgtctgcgcccacctttgcagaataaactctctcctggggtttgtctatctttgtttctctcacccgagagaaacgcaggtgttccagaggcttccttgcagacaaagcacccctgcacctcccatggctcaggatgagggaggcccccaggcccttctggttggtagtgagtgtggacagcttcccagctcttcgggtacaaccctgagcaggtcgggggacacagggccgaggcaggccttcggggcccctttcgcctgcttccgggcagggacgaggcctggtgtcctcgctccacccacccacgctgctgtcacctgaggggaatctgcttcttaggagtgggttgagctgatagagaaaaaacggccttcagcccaggctgggaagcgccttctccaggtgcctctccctcaccagctctgcacccctctggggagccttccccaccttagctgtctcctgccccagggagggatggaggagataatttgcttatattaaaaacaaaaaatggctgaggcaggagtttgggaccagcctgggctatatagcaagaccccatcactacaaattttttacaaattagctaggtgtggtggtgcgcacctgtggtcccagctactcgggaggctgtggtgggaggattgcttgagtccaggaggttgaggctgcagtcagctcagattgcaccactgcactccagcctgggcaacagagcgagaccctgtctccaaaaaaaaaaaaaaagcaatgtttatattataaaagagtgtcctaacagtccccgggctagagaggactaaggaaaacagagagagtgttacgcaggagcaagcctttcatttccttggtgggggaggggggcggttgccctggagagggccggggtcggggaggttggggggtgtcagccaaaacgtggaggtgtccctctgcacgcagccctcgcccggcgtggcgctgacactgtattcttatgttgtttgaaaatgctatttatattgtaaagaagcgggcgggtgcccctgctgcccttgtcccttgggggtcacacccatcccctggtgggctcctgggcggcctgcgcagatgggccacagaagggcaggccggagctgcacactctccccacgaaggtatctctgtgtcttactctgtgcaaagacgcggcaaaacccagtgccctggtttttccccacccgagatgaaggatacgctgtattttttgcctaatgtccctgcctctaggttcataatgaattaaaggttcatgaacgctgcg

SEQ ID NO: 57559 - DNA, 1981 bp, Homo Sapiens
ctgctcagtgtcaaattaacaggaaagtcagcttaaaggacactccttgcagggactgagctggcacctactccttagagcttgctgataccaggcctgccacgcgacatctgcaaggacagttgtttggtgttttgcttcaggttatagatggagagacctataaaggactccatgttttcgttggccctgaaatgccttatcagtctgtccaccatcatccttttgggcttgatcatcgcctaccacacacgtgaagtccagctcttcgtgatcgacaatggcgcggatgactggcggatagccatgacctacgagcgcatcctgtacatcagcctggagatgctggtgtgcgccatccaccccattcctggcgagtacaagttcttctggacggcacgcctggccttctcctacacaccctcccgggcggaggccgatgtggacatcatcctgtctatccccatgttcctgcgcctgtacctgatcgcccgagtcatgctgctgcacagcaagctcttcaccgatgcctcgtcccgcagcatcggggccctcaacaagatcaacttcaacacccgctttgtcatgaagacgctcatgaccatctgccctggcactgtgctgctcgtgttcagcatctctctgtggatcattgctgcctggaccgtccgtgtctgtgaaaggtaccatgaccagcaggacgtaactagtaactttctgggtgccatgtggctcatctccatcacattcctttccattggttatggggacatggtgccccacacatactgtgggaaaggtgtctgtctcctcactggcatcatgggtgcaggctgcactgcccttgtggtggccgtggtggcccgaaagctggaactcaccaaagcggagaagcacgttcataacttcatgatggacactcagctcaccaagcggatcaagaatgctgcagccaatgtccttcgggaaacatggttaatctataaacacacaaagctgctaaagaagattgaccatgccaaagtgaggaaacaccagaggaagttcctccaagctatccaccagttgaggagcgtcaagatggaacagaggaagctgagtgaccaagccaacactctggtggacctttccaagatgcagaatgtcatgtatgacttaatcacagaactcaatgaccggagcgaagacctggagaagcagattggcagcctggagtcgaagctggagcatctcaccgccagcttcaactccctgccgctgctcatcgccgacaccctgcgccagcagcagcagcagctcctgtctgccatcatcgaggcccggggtgtcagcgtggcagtgggcaccacccacaccccaatctccgatagccccattggggtcagctccacctccttcccgaccccgtacacaagttcaagcagttgctaaataaatctccccactccagaagcattacccataggtcttaagatgcaaatcaactctctcctggtcgctttgccatcaagaaacattcagaccagggaacggaaagaagagagaccgagctaattaactaactcatgttcattcagcgtgcttggtccgacatgccttgaaaccagaaatctaatctctgtttaggtgcctctacttgggagcgggaagaggagatgacaggaagcgacgcctctggcagggcccttgctgcagagttggtggagaacagaaatccacgctcaatctcaggtcttcacgcggggggtgggggtcagatgcactgaagtagccaacagcgaagccagtccagaagaggggtccgctgggagggagggttgtgtcaggcttgggggatgggctcttcgccatgggggtctttgaacacacctctctcctttccttttgtctacggaagcctctgggtgacaaaagtaaaagagagctgcccacaacttgccaaaacagatatactcgaatcagactgaaaaaaaaaaaaaaa

SEQ ID NO: 57560 - DNA, 7018 bp, Homo Sapiens
ggcgggcgcgccgggcggcaggtgtcggcgtcggcggcattcggcggcgatggagcggccctggggagctgcggacggcctctcgcgctggccccatggcctcggcctcctcctcctcctgcagctgctgccgccgtcgaccctcagccaggaccggctggacgcgccgccgccgcccgctgcgccgctgccgcgctggtctggccccatcggggtgagctgggggctgcgggcggccgcagccgggggcgcgtttccccgcggcggccgttggcgtcgcagcgcgccgggcgaggacgaggagtgcggccgggtccgggacttcgtcgccaagctggccaacaacacgcaccagcatgtgtttgatgatctcagaggctcagtatccttgtcctgggttggagatagcactggggtcattctagtcttgactaccttccatgtaccactggtaattatgacttttggacagtccaagctatatcgaagtgaggattatgggaagaactttaaggatattacagatctcatcaataacacctttattcggactgaatttggcatggctattggtcctgagaactctggaaaggtggtgttaacagcagaggtgtctggaggaagtcgtggaggaagaatcttcagatcatcagattttgcgaagaattttgtgcaaacagatctcccttttcatcctctcactcagatgatgtatagccctcagaattctgattatcttttagctctcagcactgaaaatggcctgtgggtgtccaagaattttgggggaaaatgggaagaaatccacaaagcagtatgtttggccaaatggggatcagacaacaccatcttctttacaacctatgcaaatggctcctgcaaagctgaccttggggctctggaattatggagaacttcagacttgggaaaaagcttcaaaactattggtgtgaaaatctactcatttggtcttgggggacgtttcctttttgcctctgtgatggctgataaggataccacaagaaggatccacgtttcaacagatcaaggggacacatggagcatggcccagctcccctccgtgggacaggaacagttctattctattctggcagcaaatgatgacatggtattcatgcatgtagatgaacctggagacactgggtttggcacaatctttacctcagatgatcgaggcattgtctattccaagtctttggaccgacatctctacactaccacaggcggagagacggactttaccaacgtgacctccctccgcggcgtctacataacaagcgtgctctccgaagataattctatccagaccatgatcacttttgaccaaggaggaaggtggacgcacctgaggaagcctgaaaacagtgaatgtgatgctacagcaaaaaacaagaatgagtgcagccttcatattcatgcttcctacagcatctcccagaaactgaatgttccaatggccccactctcagagccgaatgccgtaggcattgtcattgctcatggtagcgtgggggatgccatctcagtgatggttccagatgtgtacatctcagatgatgggggttactcctggacaaagatgctggaaggaccccactattacaccatcctggattctggaggcatcattgtggccattgagcacagcagccgtcctatcaatgtgattaagttctccacagacgaaggtcaatgctggcaaacctacacgttcaccagggaccccatctatttcactggcctagcttcagaacctggagctaggtccatgaatatcagcatttggggcttcacagaatctttcctgaccagccagtgggtctcctacaccattgattttaaagatatccttgaaaggaactgtgaagagaaggactataccatatggctggcacactccacagaccctgaagattatgaagatggctgcattttgggctacaaagaacagtttctgcggctacgcaagtcatccgtgtgtcagaatggtcgagactatgttgtgaccaagcagccctccatctgcctctgttccctggaggactttctctgtgattttggctactaccgtccagaaaatgactccaagtgtgtggaacagccagaactgaagggccacgacctggagttttgtctgtacggaagagaagaacacctaacaacaaatgggtaccggaaaattccaggggacaaatgccagggtggggtaaatccagttcgagaagtaaaagacttgaaaaagaaatgcacaagcaactttttgagtccggaaaaacagaattccaagtcaaattctgttccaattatcctggccatcgtgggattgatgctggtcacagtcgtagcaggagtgctcattgtgaagaaatatgtctgtgggggaaggttcctggtgcatcgatactctgtgctgcagcagcatgcagaggccaatggtgtggatggtgtggatgctttggacacagcctcccacactaataaaagtggttatcatgatgactcagatgaggacctcttggaatagctcttcagaggagctggacccagcatggatggtggaaccacagtacctcttacactccctgtggctccaacttcaggaaataaatttcccattgcgagggacccagctctgtttctgctgcttccatcaaagccaaaaggacctacactaaagaaatgcagggtgggggtggggaaccctgagcacttttttacaattggctctgagaaaaagggagacattttaaattctttaacttcttatttctcgtcctgtctctttgcaaagtatgggcttttttgtttttgttttttaagggaaacgaaatggaattcgaagggaccttttcactaaccccacttctgtgtgttctgcatggcgcctgccccagggcatctgccaactccagtatcagctctcacagtgtacttggtaccatccctgggctctgctggcgagacgaaacagctgtagagatgaaaacaggctgcagaggctggcacagcctggccggcttttctccatctggggacagtcctactccaagaacactgcacaccagctcctcacacagatcccacttactctttttttttttttcagagaccacagaccacagtgatttttcttttcccttgtttaattaggcaatacccttgttaattgccctttggcaactaacttaaccatgtgcttcccacacagtacatcaggaaaacttacagggcaatatttttaacttggggcaggaagaagggagcagcagagaattgactagatatagcacctattaaaagagaactcttgcttcttctgagatttttcaagctgtgctttgtgtgtgtgccagtagacttacgcaaggacagggtacaaacttagctggaagtctgcccaggctgaatgatctcttccctagagttgattgtcgggtacacagtgtgaacccccgaagacggaacctcacagtcttccatgttcccttcttaactgtcgtgtggctcgttgctaaatcatgacaatggctgcctatctgctgcttcttaggttgctgttgtacatggaaccaggactagagattttttcagatttatagacttaaaaaattagaattttattaccaggctttccttctcaccccttttttctgactttgccaagtaatttgttgacacgaaaattttggaggaaccaattgaaaacacacttccagtctagatgatgctttgtgtgatacattaagttcttattttggattaaaagaagttttccatttgatacttctctaaattaaataaattatagaatgtagttgggtggattttggggtggccatatagtaatggaaagctgcaataattagttttaatacagcttgaatatttgctatatagaaatatagtatggaaagtttttggtcttaatgtagctactgtgcgggtcacagtttctcccaatgattatgactgggacattctttggtagataccatttgctactagtttattttgtggctagaaagtcagttttgtgtgtttttttttttttttatttgaagtgccaaattaactttagtcagaatgtgagcagatggctaagttctctcctccccagaatggattaacagctgcgtggaaagtgggggagagagtggatggagacttttagagatgttaaaactgcagtagaatgaaatgagtcagggagcttcagttagaaaataaagttgaggcagtttttgtgaagataatatggttagggctggagtgcactagtctttttgcttattcattttgcatggttttaaaattaaaaataattccgaagatacaccagctcacaaatgaaaacgtcagcctctgccccaccctccctcctgcccaaagtgaatttggtactcagaaaagaactgtttataccactcacctttctcccagcatgtactcactgtgggcagatgcaccaatacatggtaatcctcttactcattttaagacgtaggaaactcaatattcttctctaaccatatacgatagggctcttcgcttttaatgatatctgggatttctgtggaacttggcaaattttcagagcaccttcactcacataatgtcatttgaacctcacaatgttcttgggatggagtcagttgttcagggtccccgtgtgtgtgataagcagtgctggctggctgtcttcagaactcttggaaatctttacacatgcgagtgctaaccactttgagcaaggctgccttcttgtagatgacttgctgttctttatgacagggatcagtggcatttgtttcctagcagtatttagcacctttttgccaccttggtgaacagaaaattgtattttcctgtctttcatggctgaaaacaaaagtaatgggaattttaaatacgtttgcagaaactgcccctcccctcattgagggtcactgctcaagagtgcaggagtggactctccactgatgggtctccctccccatcctggtttccaccccgggctggctagctctgttggtttgaagactgacagccagcctggctcattctcattattggctagttagctttctttatcaacctgctcactcacaaatgtgtgccctcagccagagagtaagaaagcccaaatctgttacagcttctaaaaaaatagatttctaatttgtcctactcatgttaggagcattatctttgaaggtaaaacatagtgtatcattgtgtaaactcccaggcttgatgtagcagaagagatcatttctggaggcttcagcaatggaatttagcattataagagagattggacaaaccagtccaaagtggtccgagttcttaaatccaggtagggaactcactcttctttcttctctggacctaattgggcattgggctttagtgagaccacagaccaggcccgtctctcctgtaggcttttaattcaatggcaactctatttcaaagaataaaagcctttggagagttgcggcagttctgggggcgggctcaggagagtccatagatcagccgtaactggaacgtagaatctacgtctgcctctgaatggacttcccacctcctctctcttgctctgatgcttgcctctgggcctctccatgcccaaggtggtctttcatccttgacaggctggtaatgtgctggccacctccagctcctgcatcgagtctgtaaaccagagctggttctcatggccttcgtcacgataccaggatacggaggggagcccagggccatccatacccaccccagggtaacggggctggcctggcattagtcattatttagtttccaggccaaccatccagatagagattccctctttcctttgagcagtgctctcaagagctccgtgcctgtccacaatgacctagagtgcatcctgctcattgtcagtgtagcccctcgcccctatattcatccaggatacttggaagtgctaaaataggaagggattcggctttcaactttgctaccatcttccctgaagcaggaaaatgaacatggacttaaatgttctttgaaaaaaccaaagttttaagatttgctgtgtgatgaagtgacagggagggccggagtcagcaggtgccagactttctgttctgtctgccatgggtttgtccagctcaggtagctctaggagcaccatcctgccctagcagagcccaggccttgccctcatgaagcatcattgaaatagcaggagcatgttgatttcttggttaggttgcattataataacaagagtcagaacattaattcgaaacaacttgcagtatgcatttcttcacaccagtacattcttaagtgtacttgtttataaggaataacataaactaatctgtacctttatatatatgtgtgtgtacatatatacatatataaactgtatagtgtacatggtaatgatttattgctatgccccagatccttaatgtagttctcatcctccgcatgccctcagccacaagcgggtgactgactgttccctgatgatttggcccacctcctgtgtttggacctctagggaggagggttttggtcatactctccttatcctcgtgcacagaaatgctcagggtccccatgtgcctgttgttcagccctctctcttgttccctttctgagcatgtggtccttccccaggctgtgggacagctgccttcccacgaaagtgtaaagcagtattaagatcattactgcatgtgccctaaaaacccaagttttctattcccttaggacagaaaattgcatgtgaggtgggataatcgagtttcagtgacccacgtcagttacacattaaagccagaccccatgataaaattccacaaaatggaaataaaactcaaatttctttagcattgtgtaaataaatctgaatgtgtttaactttgtactggtaattttctgtatatttggaatatttgggttaaaaataaaacagactggactttgttacctgacctac

SEQ ID NO: 57561 - DNA, 2481 bp, Homo Sapiens
gcgtccgcccacgcgtccgctcggtccccggggccggcggacccgcgggcaggcactgcccgggctggacgacgtctggccggctcccggcgaagggcagcggaggagcggcccagagcgcgcagctagggcactggcgaaaccccgggacagtccctctccgtgcgggggcggcgcagagcagtcccatccccggggtcccgggcgcggctgactgccggctggttccctgcgcgcagtagctccccgagccgggctgcaccggaggcggcgagatggtcgcgcgcgtcggcctcctgctgcgcgccctgcagctgctactgtggggccacctggacgcccagcccgcggagcgcggaggccaggagctgcgcaaggaggcggaggcattcctagagaagtacggatacctcaatgaacaggtccccaaagctcccacctccactcgattcagcgatgccatcagagcgtttcagtgggtgtcccagctacctgtcagcggcgtgttggaccgcgccaccctgcgccagatgactcgtccccgctgcggggttacagataccaacagttatgcggcctgggctgagaggatcagtgacttgtttgctagacaccggaccaaaatgaggcgtaagaaacgctttgcaaagcaaggtaacaaatggtacaagcagcacctctcctaccgcctggtgaactggcctgagcatctgccggagccggcagttcggggcgccgtgcgcgccgccttccagttgtggagcaacgtctcagcgctggagttctgggaggccccagccacaggccccgctgacatccggctcaccttcttccaaggggaccacaacgatgggctgggcaatgcctttgatggcccagggggcgccctggcgcacgccttcctgccccgccgcggcgaagcgcacttcgaccaagatgagcgctggtccctgagccgccgccgcgggcgcaacctgttcgtggtgctggcgcacgagatcggtcacacgcttggcctcacccactcgcccgcgccgcgcgcgctcatggcgccctactacaagaggctgggccgcgacgcgctgctcagctgggacgacgtgctggccgtgcagagcctgtatgggaagcccctagggggctcagtggccgtccagctcccaggaaagctgttcactgactttgagacctgggactcctacagcccccaaggaaggcgccctgaaacgcagggccctaaatactgccactcttccttcgatgccatcactgtagacaggcaacagcaactgtacatttttaaagggagccatttctgggaggtggcagctgatggcaacgtctcagagccccgtccactgcaggaaagatgggtcgggctgccccccaacattgaggctgcggcagtgtcattgaatgatggagatttctacttcttcaaagggggtcgatgctggaggttccggggccccaagccagtgtggggtctcccacagctgtgccgggcagggggcctgccccgccatcctgacgccgccctcttcttccctcctctgcgccgcctcatcctcttcaagggtgcccgctactacgtgctggcccgagggggactgcaagtggagccctactacccccgaagtctgcaggactggggaggcatccctgaggaggtcagcggcgccctgccgaggcccgatggctccatcatcttcttccgagatgaccgctactggcgcctcgaccaggccaaactgcaggcaaccacctcgggccgctgggccaccgagctgccctggatgggctgctggcatgccaactcggggagcgccctgttctgaaggcacctcctcacctcagaaactggtggtgctctcagggcaaaatcatgttccccacccccggggcagaacccctcttagaagcctctgagtccctctgcagaagaccgggcagcaaagcctccatctggaagtctgtctgcctttgttccttgaagaatgcagcattgtctttgtctgtccccaccacatggaggtgggggtgggatcaatcttaggaaaagcaaaaaagggtcccagatcccttggccctttcctccgaggacttctatcctccccaggcctttgtttcttcggctaaaggtacagttcctttcaagaggtaacagcactgggatccaagcagggggatgaaaaactcagcagagaaattcgagaccattttgcaagactgtgcccttctcctcaggaccccctggctcagttcttgaaaaacggtgtcatatttagtcagaggccccacccccaggaagcatggatggggatgaaggcacaggcgtctccaacctcagaggccctttgtggggtcaggacacagagtgggagggagactgatgcaggcctaccagtccctggctttttgtctggggctggaataaagaggtgccttcagctggtgggccgagaggcaggaagcagcctt

SEQ ID NO: 57562 - DNA, 3616 bp, Homo Sapiens
ggaaagtgtgaggtcagtagtagtttttgtggtacgtgcagtggtggccgcttcaaggactattttcgtcgctgcttgcgttttaagtctccaatcctgggacgaggcccatttcagggttttctgtcaccttctagccgcccgccaccccagaggggtgccagatgccccagtttttgagtgcatgcaggcaggcgaaagtggctcgaaaagacctccggcctgaatgatctccatgaagacgcggtcacgcagcctccacactctcttccccttctcgaaaattctgtgccatttaagtttcaaaatcccttataaaataagtgtcagagagctacgtgtacccgtttcttccaaattttcatcacgaagtggagatttggacgtactattttgtgatctctgtttgcagaaagtgggtacggcatcagtgccttcataatcaggtttttcaggaattgttcagatggatgaagatacacattacgataaagtggaagatgtggttggaagtcacatagaagatgcagtaacattttgggcccagagtatcaatagaaataaggatatcatgaagattggttgctcactgtctgaagtttgcccccaggccagttcagttttggggaatcttgacccaaacaagatttatggtggattattttctgaagatcagtgttggtacagatgcaaagtactgaaaatcatcagcgttgaaaagtgtctggtgaggtacattgactatggaaatactgaaattctaaatcgatctgatatagttgaaattcctttggagctgcagttttctagtgttgccaaaaagtataaactttggggactacacattccttctgatcaagaagttacccagtttgatcagggcacaacctttttggggagcttgatttttgaaaaggaaataaaaatgagaattaaagcaacctctgaagatggaacagttattgctcaggctgagtatggcagtgtggatataggggaagaggtgcttaagaaaggatttgcagagaaatgcagacttgcttccagaactgacatctgtgaggaaaaaaaattggatcctggtcaacttgttctcaggaacctcaaaagccccattcctttgtgggggcatagatcaaaccagtcaaccttcagcaggcccaaggggcacttaagtgagaaaatgactcttgacttgaaggatgaaaatgatgcaggcaatcttataacatttccaaaggaaagtttggctgttggtgactttaatttagggtctaacgtcagcctggaaaaatttaagcaggaccagaaactgattgaagaaaatgaaaaacttaaaacagagaaggacgctcttcttgaaagttataaggcgttagaattgaaagtagagcagattgcccaggagctgcagcaagagaaggcagctgctgtggatttgactaaccacttagaatacactctgaagacctatatagataccagaatgaaaaatctggcagctaagatggaaatactgaaagaaatgaggcatgtcgacatcagtgtccgtttcggaaaagacctttcagatgctatacaagtgttggatgaagggtgctttactactccagcttctttgaacggattagagataatatgggcagaatacagtctggctcaggagaatattaaaacttgtgaatatgtgagtgaagggaatattttgattgcccaaagaaatgaaatgcagcagaagctgtacatgtcagtagaagattttattctggaagttgatgagtcatctcttaataaacgcttaaaaacattgcaggatttgtcagtctctttagaagcagtgtatggacaagccaaagaaggagcaaattctgatgaaatacttaaaaaattttatgactggaagtgtgataaaagagaggagttcaccagtgttagaagtgaaacagacgcttctctgcaccgtcttgtagcatggttccaaagaaccttaaaggtttttgacctatctgtggaaggatcactgatttcagaagacgcaatggataatattgatgaaatcctagagaagactgagtcaagtgtctgcaaagagctggagatagctctggttgatcaaggtgatgcagacaaggagataatttcaaatacatatagtcaagtactgcaaaagattcattcagaggaaaggctcattgccacagtacaagctaagtacaaggacagtattgagtttaaaaagcagcttattgaatatttaaataagagtcccagtgtggatcacttgctatccattaagaagacattgaaaagcttaaaagctctactcagatggaaattggttgaaaagagtaatttggaagagtcagatgatcctgatggctctcaaattgagaaaataaaagaagaaataactcagctgcgcaataatgtctttcaggaaatttatcatgagagagaggaatatgagatgctaactagtttggcacagaaatggttccctgagctgcctctgcttcatcctgaaataggattactcaaatgcatgaactctggtggtctccttacaatgagcttggaacgagatcttcttgatgctgagcccatgaaggaacttagcagcaagcgtcctttggtacgttctgaggttaatgggcagataattctgttaaagggctattctgtggatgttgacacagaagccaaggtgattgagagagcagccacctaccatagagcttggagagaagctgaaggagactcagggttactgccattgatattcctgtttttatgtaagtctgatcctatggcttatctgatggtcccatactaccctagggcaaacctgaatgctgctcaagccaacatgcctttaaattcagaagaaactttaaaggtcatgaaaggtgttgcccagggtctgcatacattgcataaggctgacataattcatggatcacttcatcagaacaatgtatttgctttaaaccgtgaacaaggaattgttggagattttgacttcaccaaatctgtgagtcagcgagcctcggtgaacatgatggttggtgacttgagtttgatgtcacctgagttgaaaatgggaaaacctgcttctccaggttcagacttatatgcttatggctgcctcttattatggctttctgttcaaaatcaggagtttgagataaataaagatggaatccccaaagtggatcagtttcatctggatgataaagtcaaatccctcctctgtagcttgatatgttatagaagttcaatgactgctgaacaagttttaaatgctgaatgtttcttgatgccaaaggagcaatcagttccaaacccagaaaaagatactgaatacaccctatataaaaaggaagaagaaataaagacggagaacttggataaatgtatggagaagacaagaaatggtgaagccaactttgattgttaaattattattgttgttgttgcagaggttctttttaaaaactttgtttggtttggttaatacacagaaatatctagaaatgttctgggactagttgagttgtatctttagtattcaggttgtgaaaaataaagatgtttggctatgcgcttaaaaaaaaaa

SEQ ID NO: 57563 - DNA, 3284 bp, Homo Sapiens
gaagacacggacagatgaacttaaaagagaagctttagctgccaaagattgggaaagggaaaggacaaaaaagacccctgggctacacggcgtaggtgcagggtttcctactgctgttcttttatgctgggagctgtggctgtaaccaactaggaaataacgtatgcagcagctatggctgtcagagagttgtgcttcccaagacaaaggcaagtcctgtttctttttcttttttggggagtgtccttggcaggttctgggtttggacgttattcggtgactgaggaaacagagaaaggatcctttgtggtcaatctggcaaaggatctgggactagcagagggggagctggctgcaaggggaaccagggtggtttccgatgataacaaacaatacctgctcctggattcacataccgggaatttgctcacaaatgagaaactggaccgagagaagctgtgtggccctaaagagccctgtatgctgtatttccaaattttaatggatgatccctttcagatttaccgggctgagctgagagtcagggatataaatgatcacgcgccagtatttcaggacaaagaaacagtcttaaaaatatcagaaaatacagctgaagggacagcatttagactagaaagagcacaggatccagatggaggacttaacggtatccaaaactacacgatcagccccaactcttttttccatattaacattagtggcggtgatgaaggcatgatatatccagagctagtgttggacaaagcactggatcgggaggagcagggagagctcagcttaaccctcacagcgctggatggtgggtctccatccaggtctgggacctctactgtacgcatcgttgtcttggacgtcaatgacaatgccccacagtttgcccaggctctgtatgagacccaggctccagaaaacagccccattgggttccttattgttaaggtatgggcagaagatgtagactctggagtcaacgcggaagtatcctattcattttttgatgcctcagaaaatattcgaacaacctttcaaatcaatcctttttctggggaaatctttctcagagaattgcttgattatgagttagtaaattcttacaaaataaatatacaggcaatggacggtggaggcctttctgcaagatgtagggttttagtggaagtattggacaccaatgacaatccccctgaactgatcgtatcatcattttccaactctgttgctgagaattctcctgagacgccgctggctgtttttaagattaatgacagagactctggagaaaatggaaagatggtttgctacattcaagagaatctgccattcctactaaaaccttctgtggagaatttttacatcctaattacagaaggcgcgctggacagagagatcagagccgagtacaacatcactatcaccgtcactgacttggggacacccaggctgaaaaccgagcacaacataacggtcctggtctccgacgtcaatgacaacgcccccgccttcacccaaacctcctacaccctgttcgtccgcgagaacaacagccccgccctgcacatcggcagcgtcagcgccacagacagagactcgggcaccaacgcccaggtcacctactcgctgctgccgccccaagacccgcacctgcccctcgcctccctggtctccatcaacgcggacaacggccacctgttcgccctcaggtcgctggactacgaggccctgcaggctttcgagttccgcgtgggcgccacagaccgcggctcccccgcgctgagcagagaggcgctggtgcgcgtgctggtgctggacgccaacgacaactcgcccttcgtgctgtacccgctgcagaacggctccgcgccctgcaccgagctggtgccccgggcggccgagccgggctacctggtgaccaaggtggtggcggtggacggcgactcgggccagaacgcctggctgtcgtaccagctgctcaaggccacggagcccgggctgttcggtgtgtgggcgcacaatggggaggtgcgcaccgccaggctgctgagcgagcgcgacgcagccaagcacaggctcgtggtgcttgtcaaggacaatggcgagcctcctcgctcggccaccgccacgctgcacttgctcctggtggacggcttctcccagccctacctgcctctcccggaggcggccccggcccaggcccaggccgaggccgacttgctcaccgtctacctggtggtggcgttggcctcggtgtcttcgctcttcctcctctcggtgctcctgttcgtggcggtgcggctgtgcaggaggagcagggcggcctcggtgggtcgctgctcggtgcccgagggtccttttccagggcatctggtggacgtgaggggcgctgagaccctgtcccagagctaccagtatgaggtgtgtctgacgggaggccccgggaccagtgagttcaagttcttgaaaccagttatttcggatattcaggcacagggccctgggaggaagggtgaagaaaattccaccttccgaaatagctttggatttaatattcagtaaagtctgtttttagtttcatatacttttggtgtgttacatagccatgtttctattagtttacttttaaatctcaaatttaagttattatgcaacttcaagcattattttcaagtagtatacccctgtggttttacaatgtttcatcatttttttgcattaataacaactgggtttaatttaatgagtatttttttctaaatgatagtgttaaggttttaattctttccaactgcccaaggaattaattactattatatctcattacagaaatctgaggttttgattcatttcagagcttgcatctcatgattctaatcacttctgtctatagtgtacttgctctatttaagaaggcatatctacatttccaaactcattctaacattctatatattcgtgtttgaaaaccatgtcatttatttctacatcatgtatttaaaaagaaatatttctctactactatgctcatgacaaaatgaaacaaagcatattgtgagcaatactgaacatcaataatacccttagtttatatacttattattttatctttaagcatgctacttttacttggccaatattttcttatgttaacttttgctgatgtataaaacagactatgccttataattgaaataaaattataatctgcctgaaaatgaataaaaataaaacattttgaaatgtgaaaaaaaaaaaaaaaaaaaaaa

SEQ ID NO: 57564 - DNA, 3770 bp, Homo Sapiens
caagccgccggcccggagagcgcgcggcggcggcggcggcgggacggccccgagcgcgccctccccgtgcggccactcgcagcggcgctggccgggccggcgcgcccgcaggcggctagagcagcggcctcggcctcggcgcgggcttgccccgggccgtagcccgcgagaggcggcgcgggcggccgagggcactgaacggcgtcgcggtacgctcccgggcggcggcgcagcggcagcggcagcggcagcggcagcgcagggggcggaggcagggggcgcccccagccaggatgctgcggttcctgcgccggacctttggccgccgctccatgcagcgctacgcggggcgcggcggggcgcggggccgccgggctgggggacgagcgcgatgggggccacgggggggcccggccgccgccgcctcctcctcggcgctgcccgccgcgcccgggggcagcgtgttcccggcgggcggcgggcccctgctcaccggcggcgcggccgtgcacatctccgccgccggcgccgccaaggccaccctctactgccgcgtcttcctgctcgacgggaccgaagtgagcgtggacctgccgaaacatgccaaaggccaggatttgtttgatcagattgtgtaccacttggaccttgtggaaacagattactttggcctccagttcctcgactctgcccaggttgcgcactggctggatcatgccaaacccataaaaaagcagatgaaaattggacctgcttatgctttacactttcgagttaaatactattcttcagaaccaaacaaccttcgtgaggagtttacaaggtacctgtttgttttacaactcaggcatgacattctttctggaaaattgaaatgcccttatgaaacagctgtggaattagctgctctctgtctacaagcggagcttggggagtgcgagcttccagaacacacaccagagcttgtgtctgagtttcggttcattccaaatcagacagaagcaatggaatttgatatcttccagagatggaaagagtgcaggggaaagagccctgcccaggcggaactctcctatctgaataaagcgaagtggctggaaatgtatggggtagacatgcacgttgtcaggggaagagatggctgtgaatattctcttggactgaccccgacaggcatattaatctttgaaggagctaacaaaataggcttattcttttggcctaaaattaccaaaatggattttaaaaagagcaaattgacactcgtggtggtcgaggatgatgatcagggacgtgagcaagagcacacgtttgtgttccggttagacagtgccaggacctgcaaacacctttggaagtgtgcagttgagcaccacgcattcttccgactgcggacgccaggaaacagcaaatccaatagatccgactttatcaggctgggctctcgcttcagattcagtgggcggacagaatatcaagctacacatggctccaggttacgaagaaccagcacctttgagaggaagcctagtaaacgttatccatcccggagacattcaacgttcaaagcaagcaacccagtgatagcagcccagctctgctctaaaacaaatccggaagtccataattaccagcctcaatatcatcctaatatccatcccagccagccccggtggcatcctcactctccaaatgtcaggccatcctttcaggatgacaggtcgcattggaaagcatcggccagtggagatgacagccattttgattatgtccacgaccagaaccagaagaacttaggagggatgcaaagtatgatgtatcgagataaactcatgactgcactttgagagactgaagcatctctcttccattcaccttcatagtttcattgcattccatgaaaagtgtcttggcctcagatggatggatgtgtttggacgagtgtctttaaggagtagtcctgaaaggtgtttttggtgtccatgtaaatatttgaagataaaaccactatagcttgtcataatttactgttgactgcattctcattaaaatgaaggtaaaggctcaggaatcatattgatgttctgattttaaaattggagtcaaagtctatgtttatcattttactatgttcctgatgttctttgttatttaattaatgggagcaaataaaaccagaagagcttgggaagattgctcagcatatattcctgtcgtagaagttgagattgctagggtccagtttccctagtgtggcctggacgagtcatttccccttcattgacctcattttccccatctgaaaagagagggcttggactaagtgatctccaaggtcctttccaactctaaaattctgcaatttgttaacatttcattttgtttaggttgaggacatacattcaaactaattttatcacaaggaaaacgtcaatacccacttccttgacagagttactctttcagaagctaaataaagtatataacttattagatgttatatagatacagggggactttgaatttcacatcttaaagcagttgagctactttgaatttaagcagtcgtactaatcttaaattgcatagcatttgttttgatcgaatttactgctcaagtatggaataatttttaatgtcttaatgattggtgctgctaacttgcgtgatttcagaagactgtacgaattgggggattggtttttaccctagacttcactcttaaaaagcaagctgcaatcaagatcatttatggctcaaatgaaagcatataaggttttcttgaagttgtgccaaagcattctgtagagtaggatgagatggttgttgccctagtctgttggtagaaccagaaatcaatatgttgtcttttaggttaaagcttgtaccaaaatatttatttcccccatttcaagccctgagtcaaacatttttttctcttaataatagacctgaaatgttttattagtatttctgtgaaatcagttgattcttgtgccatttttgtatatgtaattgtaattttgcccatgttaggccctctaaaaaatgtttgacatcctttgagatattttattactaaaatctgatcttttttggctactgcaaaaatctattcagcaagaaggtatcagctgcataccttgcacagtggagctgactacctataaactctccctaaggcatttgtttacaggtgtattccattttagcagacgttctgatgctcagtgtatgtgctgcatacaaataaatgtgttctgaatcttttcatcttattgatagcatttttacaaatgtgtttccaaggaataaagattattcttgctttttttttgactccatcttcattttttttaaattgattcttgttgctatgcagaagtctcatttgtgaatgaccttggtaacagaacagttggcttttggaagtctgaaggtgagcattcagttaggtgggtggagcaagatcatcctagaatgaggctgctcttggcaagagtggatcttataggcacagcagctgatgcctttcttcatctggggcaactctggtgaaggttgtcctgcctgtcacaggtgctgagtagagagaagtggtggcagtgggatttcctcagtaatagtcctgtaaaggtacgtgtttgtcctggctacttgtgctcttcctggcaggaaggcatccaaacccttatctgtgggctcctggaaattgtgtatgccatataataccctctaataaatacctctctgcttaaaaaaaaaaaaaa

SEQ ID NO: 57565 - DNA, 5251 bp, Homo Sapiens
agaaagctgcggcgcgagtccgcggggccgacctcggagacgcagctggggccgggcgcggcttggcgggagggtctgcagcgccgagggaggctgccagtgcgtgaggaagagagctagagactggacaggggagacagagcagcgtcagagccgcgcaggggacgggagtgagagcaggagcgacgcagagcggccgtcgccgtgcccgggtctcagggcgcctggctgaagtgagcatggcttcagtggcctgggccgtcctcaaggtgctgctgcttctccccactcagacttggagccccgtgggagcaggaaatccacctgactgtgatgccccactggcctctgccttgcctaggtcatccttcagcagctcctcagagctgtccagcagccacggcccggggttttcaaggcttaatcgaagagatggagctggtggctggactccacttgtgtcaaataaataccaatggctgcaaattgaccttggagagagaatggaggtcactgctgtcgccacccaaggaggatatgggagctctgactgggtgaccagctacctcctgatgttcagtgatggtgggagaaactggaagcagtatcgccgagaagaaagcatctggggttttccaggaaacacaaacgcagacagtgtggtgcactacagactccagcctccctttgaagccaggttcctgcgctttctccctttagcctggaaccctaggggcaggattgggatgcggatcgaagtgtacggatgtgcatataaatctgaggtggtttattttgatggacaaagtgctctgctgtatagacttgataaaaaacctttaaaaccaataagagacgttatttctttgaaatttaaagccatgcagagcaatggaattctacttcacagagaaggacaacatggaaatcacattactctggaattaattaaaggaaagcttgtcttttttcttaattcaggcaatgctaagctgccttccactattgctcctgtgaccctcaccctgggcagcctgctggacgaccagcactggcattccgtcctcatcgagctcctcgacacgcaggtcaacttcaccgtggacaaacacactcatcatttccaagcaaagggagattccagttacttggatcttaattttgagatcagctttgggggaattccgacacccggaagatcgcgggcattcagacgtaaaagctttcatgggtgtttagaaaatctttattataatggagtggatgttaccgaattagccaagaaacacaaaccacagatcctcatgatgggaaatgtgtccttctcatgtccacagccacagactgtccctgtgacttttctgagctccaggagttatctggctctgccaggcaactctggggaggacaaagtgtctgtcacttttcaatttcgaacgtggaacagagcaggacatttgcttttcggcgaacttcgacgtggttcagggagtttcgtcctctttcttaaggatggcaagctcaaactgagtctcttccagccgggacagtcaccaaggaatgtcacagcaggtgctggattaaacgatgggcagtggcactctgtgtccttctctgccaagtggagccatatgaatgtggtggtggacgatgacacagctgttcagcccctggtggctgtgctcattgattcaggtgacacctattattttggaggctgcctggacaacagctctggctctggatgtaaaagccccctgggagggtttcagggctgcctaaggctcatcaccattggtgacaaagcggtggatcccatcttagtacagcagggggcgctggggagtttcagggacctccagatagactcctgcggcatcacagacaggtgcttgcccagctactgtgagcatgggggcgagtgttcccagtcgtgggacaccttctcctgtgactgtctaggcacaggctatacgggcgagacctgccattcctctctctacgagcagtcttgtgaagcccacaagcaccgagggaacccgtctgggctttactatattgatgcagatggaagtggccccctgggaccatttcttgtgtactgcaatatgacagcagacgccgcgtggacggtggtgcagcacggtggccccgacgcggtgaccctccgaggtgcccccagcgggcacccgcgctcggctgtgtccttcgcgtacgcagcgggcgcggggcagctgcggtccgcggtgaacctggcggagcgctgcgagcagcggctggctctgcgctgcgggacggcgcggcgcccggactcacgagatggaaccccactgagctggtgggttggaagaaccaatgaaacacacacttcctggggaggttctctgcctgatgctcaaaagtgtacttgtggattagaggggaactgcattgattctcagtattactgcaactgtgatgctggccggaatgaatggactagtgacacaatagtcctttcccaaaaggagcacctgccagtcactcagattgtgatgacagacgcaggccgaccacattccgaagcagcttatacactggggccactgctctgccgcggagatcagtcattctggaattcagcttccttcaacactgagacttcataccttcatttccctgctttccacggagaactcactgctgacgtgtgcttcttttttaagaccacagtttcctccggggtgtttatggagaacctggggatcacagatttcatcaggattgagctgcgtgctcccacagaagtgaccttttccttcgatgtggggaatggaccttgtgaggtcacggtgcagtcacccactccctttaatgacaatcagtggcaccacgtgagggcagagagaaatgttaaaggagcgtctcttcaagttgatcagcttcctcagaagatgcagcctgcccctgctgatgggcacgttcgtttacagctcaacagccagctcttcattggtggaacggccaccagacagagaggctttctaggatgcattcggtctctgcagttgaacggggtggccctggatctggaagaaagagccacagtgacgccaggagtggagccagggtgtgcaggacactgcagcacctatggacacttgtgtcgcaatggagggagatgcagagagaaacgcaggggggtcacctgtgactgtgccttctcagcctatgatgggccgttctgctccaatgagatttccgcatattttgcaactggctcctcaatgacataccattttcaagaacattacactttaagtgaaaactccagctctctcgtttcttcattacacagagatgtaacattgaccagagaaatgatcacactgagcttccgaaccacacgaactccgagcttattgctgtatgtgagctctttctatgaggaatacctttcagttatcctcgccaacaatggaagtttgcagattaggtacaagctagatagacatcaaaatcctgatgcatttacctttgattttaaaaacatggctgatgggcaacttcaccaagtgaagattaacagagaagaagctgtggtcatggtagaggttaaccagagcacaaagaaacaagtcatcttgtcctcagggacagaattcaacgccgtcaaatctctcatattgggaaaggttttagaggctgccggcgcggacccggacacaaggcgggcggcgactagtggcttcactggctgcctctcggcggtgcgcttcggccgcgctgctcccctgaaggcggcgctgcgccccagcggcccctcccgggtcaccgtccgcggccacgtggcccctatggcccgctgcgcagcgggggcggcgtccggctccccggcgcgggaactggctccccgactcgcggggggcgcaggtcgttctggaccagcggatgagggagagcccttggttaatgcagacagaagagactctgctgtcatcggaggtgtgatagcagtggtgatatttattttgctttgcatcactgccatagccatacgcatctatcaacagagaaagttacgcaaagaaaatgagtcaaaagtctcaaaaaaagaagagtgctaggacagctctaaacagtgagctcgatgtgcaaaacgcagtccatgaaaaccagaaagagcgagtcttctgattggcagctgtggctgtctctatcatcgtgactgtggacttccctgctgttgccatcagggtgcacacaagcaggtgcagtgctgtcacctggctgaagacctgcagcctcggagcctctgggaggtccctttctccctcggtgaaacacagtcctccacatcaatttccaaacaatgaattaggtatggccattcatcactgttcagtagtttccccgtccaaaggctctcttccaaaactgcagtttgatctgtgttaataattgtggggttttagatgagaaaatggctataaagctgtggccctactttattttttaaaaatgacagaacttttgttcagatgtaaaagacaaaattgcactttaatgttttttgttacttgaaaacatatctgggatccctttttttggtcctctgctgatatttataaaacaagaaatgcttcttggactaccttcactggcatttccatagtcctggaatccagagccaagtggcctatctaaaattcacagcccttttattctcctgtgtgatggttaatacaacacagttgaagcctggaaacactaccattatttttggtgtattgctttttctaattgactgtttttaatgattttgatacattttaatgttgaaattaatattgaatgttagctatgaaattttagtattgaattttataatggaacagaacattggtaggtaacaagatgcaagaggatgtcaatacaagattgtctgcctgtttttctttgtaatttgtaattacagtttttgtaacttgtgattatgtttttaactaaatttaccaccagatacaaacaatacttcttacacagagttatcctttatttatatcattaagacgtgaatgaaacatcatcctaacttacttccccaagatattgagaggtcatatctgtttttctttatcattcatttctttttctaaaagttgttactgatatgcttttgatttcctatgactctattatgttgtacagaacatcttttcaatttattaaaaaaatagcttaactgaaaaaaaaaaaaaaaaaaaaaaaa

SEQ ID NO: 57566 - DNA, 3158 bp, Homo Sapiens
aaaccggaacggggcccaacttctggggcctggagaagggaaacgaagtcccccccggtttcccgaggttgcctttcctcgggcatccttggtttcggcgggacttcgcagggcggatataaagaacggcgcctttgggaagaggcggagaccggctttaaagaaagaagtcttggtcctgcggcttgggcgaggcaagggcgaggcaagggcgctttctgccgacgctccccgtggccctacgatcccccgcgcgtccgccgctgttctaaggagagaagtgggggccccccaggctcgcgcgtggagcgaagcagcatgggcagtcggtgcgcgctggccctggcggtgctctcggccttgctgtgtcaggtctggagctctggggtgttcgaactgaagctgcaggagttcgtcaacaagaaggggctgctggggaaccgcaactgctgccgcgggggcgcggggccaccgccgtgcgcctgccggaccttcttccgcgtgtgcctcaagcactaccaggccagcgtgtcccccgagccgccctgcacctacggcagcgccgtcacccccgtgctgggcgtcgactccttcagtctgcccgacggcgggggcgccgactccgcgttcagcaaccccatccgcttccccttcggcttcacctggccgggcaccttctctctgattattgaagctctccacacagattctcctgatgacctcgcaacagaaaacccagaaagactcatcagccgcctggccacccagaggcacctgacggtgggcgaggagtggtcccaggacctgcacagcagcggccgcacggacctcaagtactcctaccgcttcgtgtgtgacgaacactactacggagagggctgctccgttttctgccgtccccgggacgatgccttcggccacttcacctgtggggagcgtggggagaaagtgtgcaaccctggctggaaagggccctactgcacagagccgatctgcctgcctggatgtgatgagcagcatggattttgtgacaaaccaggggaatgcaagtgcagagtgggctggcagggccggtactgtgacgagtgtatccgctatccaggctgtctccatggcacctgccagcagccctggcagtgcaactgccaggaaggctgggggggccttttctgcaaccaggacctgaactactgcacacaccataagccctgcaagaatggagccacctgcaccaacacgggccaggggagctacacttgctcttgccggcctgggtacacaggtgccacctgcgagctggggattgacgagtgtgaccccagcccttgtaagaacggagggagctgcacggatctcgagaacagctactcctgtacctgcccacccggcttctacggcaaaatctgtgaattgagtgccatgacctgtgcggacggcccttgctttaacgggggtcggtgctcagacagccccgatggagggtacagctgccgctgccccgtgggctactccggcttcaactgtgagaagaaaattgactactgcagctcttcaccctgttctaatggtgccaagtgtgtggacctcggtgatgcctacctgtgccgctgccaggccggcttctcggggaggcactgtgacgacaacgtggacgactgcgcctcctccccgtgcgccaacgggggcacctgccgggatggcgtgaacgacttctcctgcacctgcccgcctggctacacgggcaggaactgcagtgcccccgtcagcaggtgcgagcacgcaccctgccacaatggggccacctgccaccagaggggccacggctatgtgtgcgaatgtgcccgaagctacgggggtcccaactgccagttcctgctccccgagctgcccccgggcccagcggtggtggacctcactgagaagctagagggccagggcgggccattcccctgggtggccgtgtgcgccggggtcatccttgtcctcatgctgctgctgggctgtgccgctgtggtggtctgcgtccggctgaggctgcagaagcaccggcccccagccgacccctgccggggggagacggagaccatgaacaacctggccaactgccagcgtgagaaggacatctcagtcagcatcatcggggccacgcagatcaagaacaccaacaagaaggcggacttccacggggaccacagcgccgacaagaatggcttcaaggcccgctacccagcggtggactataacctcgtgcaggacctcaagggtgacgacaccgccgtcagggacgcgcacagcaagcgtgacaccaagtgccagccccagggctcctcaggggaggagaaggggaccccgaccacactcaggggtggagaagcatctgaaagaaaaaggccggactcgggctgttcaacttcaaaagacaccaagtaccagtcggtgtacgtcatatccgaggagaaggatgagtgcgtcatagcaactgaggtgtaaaatggaagtgagatggcaagactcccgtttctcttaaaataagtaaaattccaaggatatatgccccaacgaatgctgctgaagaggagggaggcctcgtggactgctgctgagaaaccgagttcagaccgagcaggttctcctcctgaggtcctcgacgcctgccgacagcctgtcgcggcccggccgcctgcggcactgccttccgtgacgtcgccgttgcactatggacagttgctcttaagagaatatatatttaaatgggtgaactgaattacgcctaagaagcatgcactgcctgagtgtatattttggattcttatgagccagtcttttcttgaattagaaacacaaacactgcctttattgtcctttttgatacgaagatgtgctttttctagatggaaaagatgtgtgttattttttggatttgtaaaaatatttttcatgatatctgtaaagcttgagtattttgtgatgttcgttttttataatttaaattttggtaaatatgtacaaaggcacttcgggtctatgtgactatatttttttgtatataaatgtatttatggaatattgtgccaatgttatttgagttttttactgttttgttaatgaagaaattcctttttaaaatatttttccaaaataaattttatgaggaattc

SEQ ID NO: 57567 - DNA, 2943 bp, Homo Sapiens
gtgctgcctggcgctggctaggaggcaaacgcacgcgggaagagctgctacccattccagggaccctgccgctgcccctctgaggggtctgcacctcctgggagcaggtgggtctctgggacgagggtccatggtggatggctctggagacgctcccgaggctgtgccgtcccgctgctgcacaggtcggagggtcaccgcagaggctactcgggctggggctggggccgagggagcccgcactggagccccatgtggaacccaaggatgcagctgctctgctaacacggcagcccatccttcgagactgtgacctcgccacagtggccctcagccctccacctccggcgggggcgagggccacccacctccaagtctccagccatgacgacctccgcactccggcgccaggtgaagaacatcgtgcacaactactccgaggcagaaatcaaggtgcgcgaggccaccagcaatgacccctggggcccccctagttcgctcatgtccgagatcgctgacctgaccttcaacacagtggccttcaccgaagtcatgggcatgctgtggcggcggctcaatgacagcggcaagaactggcggcacgtgtacaaggctctaacattgctggactacctgctcaagacgggctccgagcgggtggcccaccagtgccgcgagaacctctacaccatccagacactcaaggacttccagtacatcgaccgcgacggcaaggaccagggcgtcaacgtgcgcgagaaggtcaagcaggtgatggccctgctcaaggatgaggagcggctgcggcaggagcgaacccacgccctcaagaccaaggagcgcatggcactggagggcatcggcattggcagtgggcagctgggcttcagccgccgctacggcgaggactacagccgctcccggggctccccgtcctcctacaactcctcctcttcgtcaccccgctatacctccgacctggagcaggcccggcctcagacgtcaggggaagaggaactgcagctgcagctggccctcgccatgagccgtgaggaggcagagaagcctgtccccccagcctcccacagggacgaggacctgcagctgcagctggctctgcgcctgagccggcaggagcacgagaaggaggtgaggtcctggcagggtgatggctcccccatggccaatggtgcaggggccgtggtccaccatcagcgggacagagagcctgagagagaggagagaaaggaggaggagaagctaaaaaccagccagtcctccatcctggacttggctgacatcttcgtacctgccctggccccgccctccacacactgctctgctgacccatgggacatcccaggttttaggccgaacacagaggccagtggatcctcctgggggccttctgcagacccctggtctccgatcccctcaggaaccgtcctgtcccgaagccagccctgggatctgactcccatgctctcctcctctgagccctggggcaggaccccagtgctgcctgctgggccccccaccacagacccctgggccctgaactctccccactacaaactccccagcactggggctgacccttggggagcctccctggagacctccgacacacctggtggtgcctcgacctttgacccatttgccaaacctccagaatccacagagaccaaggaggggctggagcaggccctgccctctgggaagcccagcagccctgtggagctggacctgtttggagaccccagccccagttccaagcaaaatggcacgaaggagccagatgccctggacctgggcatactaggggaagcactaacccagccaagcaaagaggcccgagcttgccggactcccgagtccttcctgggtccctcagcttcctccttggtcaaccttgactcgttggtcaaggcaccccaggttgcaaagacccggaaccccttcctgacaggtctcagcgctccgtcccccaccaacccgttcggcgcgggcgagacgggcaggccgacgctaaaccagatgcgcaccggctcgccggcgctgggcctggcaggcgggcctgtgggggcgcccctgggctccatgacctacagcgcctctctgcccctcccgctcagcagcgtgccagctggcttgaccctccccgcctcggttagcgtcttcccgcaggccggagccttcgcaccgcagccgctgctgcccacgccgagctcagccgggccgcggcccccgcccccgcagaccggcaccaaccccttcctctgagccccgccccgtcccataccggcctgcgcctgcgccggacgctccgcggccccgcctccggacccggggctgggcggggcgccggtgctagtggaacgccgtgccagtggcggctggtatcccgcggcggctctggaagctggacgcggaccacggcccgggagctagaaactgaacgcccgcataataaagactggaacccacgttctcagctctcaccaagtggactttttgcggggtgtggcggccgggtctcgaccacagcgtggatcaccggctgtttaggaaactgcagctgcacaacgtggggtgcaaaactgccccgcttcctttacagctcttctcaaccctcacctccatcccccgtcacccaggcaccttcgcttccagatgctgccaggctgtcactcaattcggtcatttcattcatttatcacacatgggcactggggttgggctaacagcaagagacaataggcctttgttcctatttattgggtactgcttacgtgctaagcagatcagtttatttaatgcttgcaacgactctctgaggtagaaaatattgttaattccgttcaggatcccggctacataatctgtggggctcaatacaaaataaaaatgtaggggctccttgttcaaaaaaaaaaaaaaaaa

SEQ ID NO: 57568 - DNA, 2064 bp, Homo Sapiens
gctaaagagcgcgggtcctcggccgtggagggtcaagtggcttcttctgagcgctgagggaggggagcgtgcgtaggggatggtgccagcgctgcgttatttggttggtgcctgcggacgggcccgcgggcttttcgccggtggctcccctggggcgtgcgggttcgcgtctgggaggccaagaccgctgtgtggaggtagccgcagcgccagcaccagctcatttgatatagtcatcgttggtggcggaattgtggggcttgcctctgccagagcactcatcctgcgacatccatcactttctattggtgttctggaaaaggagaaagatttagctgttcaccagactggacataacagtggtgtcatacatagtggaatttattataaacctgagtctctgaaagccaaattatgtgtacaaggtgcagccctcctctatgagtactgtcagcaaaaggggatttcctacaagcagtgtggcaagcttatagtagctgttgaacaagaagaaattcccagacttcaggccctatatgagaaaggcctccagaatggtgtcccgggcctgaggctgatccagcaggaggatataaaaaagaaggagccatattgtaggggtctaatggctattgattgtccacatactggcattgtggactatcggcaggtggctttgtcatttgcccaggatttccaagaagcaggtggctctgtcttgaccaattttgaagtaaaaggtattgaaatggctaaagaaagtccttcaagaagtatagatggaatgcaatatccaattgttataaagaatacaaagggagaggaaattcgatgtcagtatgttgtgacatgtgcaggactttactcagaccgtatttcagagttgagtggctgcactcctgatcctcgaattgtaccattccggggagattacctgcttttgaagccagaaaaatgttatcttgtaaaaggaaatatttatccggtcccagatagccggtttcctttcctaggagttcacttcacaccaaggatggatggcagtatttggctagggcctaatgcagttcttgcctttaaacgagagggttacagaccctttgacttcagtgccacagatgttatggatataattatcaatagtggcttgattaaactggcatcccagaatttttcctatggagttactgaaatgtataaagcatgttttcttggtgcaacagtgaagtatcttcaaaaattcatccctgaaattactatcagtgatatacttaggggcccagctggagtaagagcccaggccctggatagagatggaaatctggtagaagattttgtatttgatgcaggagttggggatattggaaatcgcattcttcatgtgagaaatgcaccttctcctgctgctacttcttccattgcaatttctggaatgattgcagatgaagtacaacaaagatttgaattataaataatgaaaggagctaggtatgcactgtaatcttcatgtcagcaacaagaatgtactaattgcattctttaatttaaaaaatggtttttaaactttcgtttttaggtcaaagataaccactgcattgttaaaatgatgtaacatagaaataataattttctacaaaaattagccaggcatggtggcgcatgcctgtaatctcagctactcaggaggctgaggcaggagaatcaattgaaccgagcagacggaggtgagctgagagctgagattgcaccactgcactccagcctgggtgacagagcaagaaaataataataataataattttcaaaatgttaggctgggggccgtggccagcactttgggaagccaaggcaggtagattgtagcccaggagtttgagaacagcctgggcaacatggcaaaaccctgtttctacacaaagttagctgggtctggtgcctctgtggttccagctcctcagtaggctgaggtgagaggatcacttgagcccaggaggtctaggctgcagtgagcttatgttcatgactctgtattccaggctggatgatagagcaagatcttgtctc

SEQ ID NO: 57569 - DNA, 1507 bp, Homo Sapiens
gggaaggaggcgttcgtctagatttgtcggcttgcggggagacttcaggagtcgctgtctctgaacttccagcctcagagaccgccgcccttgtccccgagggccatgggccgggtctcagggcttgtgccctctcgcttcctgacgctcctggcgcatctggtggtcgtcatcaccttattctggtcccgggacagcaacatacaggcctgcctgcctctcacgttcacccccgaggagtatgacaagcaggacattcagctggtggccgcgctctctgtcaccctgggcctctttgcagtggagctggccggtttcctctcaggagtctccatgttcaacagcacccagagcctcatctccattggggctcactgtagtgcatccgtggccctgtccttcttcatattcgagcgttgggagtgcactacgtattggtacatttttgtcttctgcagtgcccttccagctgtcactgaaatggctttattcgtcaccgtctttgggctgaaaaagaaacccttctgattaccttcatgacgggaacctaaggacgaagcctacaggggcaagggccgcttcgtattcctggaagaaggaaggcataggcttcggttttcccctcggaaactgcttctgctggaggatatgtgttggaataattacgtcttgagtctgggattatccgcattgtatttagtgctttgtaataaaatatgttttgtagtaacattaagacttatatacagttttaggggacaattgagatggctgaactactgaataaaaaaaaaacaacgctgttttctagtcctgcagaccgtaagatacttggtatcgcttctattttggttactacggtaggtgcctggcggaagggagtgggcggagatatgtaaatagaaagtgcgtacagttagaacgtccggcacgtaactgatcggagcattctgggaagaagtaatttattccttttcggcagccgaatgaaaaaaaaatttaaaaaaatgtgcgagctaatatggcaaaacaactggaaggacgctaaataataggattgctcataccagcgcgttatgaactcaccctagcttgtaacggaatctttttcactgagtgcagaatgtcggctgtttgtctgtatcgtcaggtgggataatccttacctgttcctcctccggagggcagattagaacatgatgattggagatgcatgaaacgtgattaacgtctctgcgtaatcaggacttgcaacaccctgattgctcctgtctgattctttctgacgatcacttacatttgtgttatgctgattagcagatatccacaaacatagctatgaagttctgactgggataaccttgctgtttgtctattttgcagtcttgctattgctgtttgtctattttgcagtcttgctaaatttgtttgttcttgaaaattgtgatttggtttttgttgctttctggaatttaggcagtgaaataataaaaaaaaaaaaaaaaaa

SEQ ID NO: 57570 - DNA, 2146 bp, Homo Sapiens
gcccatctttggaaaaaagatctgggaatgattgtctagcctccagcctcaacttacttgatgcttgagagactcaaagccccgtggtcagctgccctgcaaagaaagtattttgaccttggcatttggacagctcccatctctcccatggccctgacaatgctgaatgggctcctgattaaggactcaagcccacctatgctgctgcaccaggttaacaagactgcccagttagataccttcaactaccagagctgctttatgcaaagtgtctttgaccatttccctgagatcttatttatccaccggacctataacccaaggggtaaggtcttatataccttcctggtggatggacctcgggtgcagctggagggtcatcttgcccgagcagtctactttgccatccctgccaaggaggacactgaaggcctggcccagatgttccaagtattcaagaagtttaatccagcatgggagagagtctgtaccatcctggtggatcctcatttccttccactgcctatcctagctatggagttccccacagctgaggtccttctctcagccttccacatttgtaagttcctccaggccaagttctatcagctgtcccttgaacggcccgtggaaaggctgctcctgacctccctgcagagcacaatgtgctcagccacagcaggcaacctgagaaagttgtatacactcctgagcaactgcatccctccagccaagctgcccgagcttcactcacactggctgctcaacgaccgcatctggctggctcaccgctggagaagccgagctgagagcagccactacttccagagcctcgaggtcaccacccacatcctcagccagttctttggtaccaccccatctgagaaacaaggtatggcttctctgttccgttacatgcagcagaactctgcagacaaggcaaacttcaaccagggcctgtgtgcccagaacaatcatgctccctcagacaccatccccgaaagccccaaactggagcagctggtagaatcccacatccagcactccctcaatgccatctgcacagggccagcagcccaactgtgcctgggcgagcttgctgtggtccagaaatccacacacctcattggctctggctcagaaaagatgaacatacagatcctggaagatacccataaggtgcagccccagccccctgccagctgcagctgctactttaaccaggccttccacctgccctgccgccacatcctagccatgctcagtgcccgccgccaggtgctccagcccgacatgctgccggctcagtggacggcaggctgtgctaccagtctagacagcatcctgggcagcaagtggagtgagaccctggataagcacctggcagtgactcacctcaccgaggaggtgggtcagctgttgcagcactgcaccaaggaggagtttgagcggaggtatagcaccctgcgggaactggccgacagctggattgggccttatgagcaggtccaactctgattattctcgatgcccagagatgctcatgcacctgtgcacactcacatccacccatacacacacacacacacacacacacacacacacacacactcccttacactgttgtacttccgtgggccctccttccagaacaaggacaacaaggacaaggttgaagggtcttctcatctaccatggcctgctacctagcatgtgtctagctcaatgagacaggagtcagcaaatcttaatctgtttagtttactcaggtggccacatacagtctctgttgtatattcttggttttgttttaatattttttttctttttttttttttttttttttttgagaaggagtctgtctcccctgggagggtgagactccatctaaaaaaaataaaataaatggcaacccctggtctaagataagagataaaacatcaggtggtgaggttgaggtttggggcttggtagcagttgccccagtcatgagatgactcacttaacccgtctcctttaagtgagctgggctgggaggcttcctacaggggaagaggcccctctggggagctgactcagccaggctccctgaacttttttccttgtcccatcctggggtcaataaaactgaatgttgcatattcta

SEQ ID NO: 57571 - DNA, 2326 bp, Homo Sapiens
ggcctttgtcaagtcatcccctcttctcctcaggaactgctcaaacctgtgccccaaagatgagggcccaggaggacctcgagggccggacacagcatgaaaccaccagggacccctcgaccccgctacccacagagcctaagtttgacatgttgtacaagatcgaggacgtgccaccttggtacctgtgcatcctgctgggcttccagcactacctgacatgcttcagtggtaccatcgccgtgcccttcctgctggctgaggcgctgtgtgtgggccacgaccagcacatggttagtcagctcatcggcaccatcttcacgtgcgtgggcatcaccactctcatccagaccaccgtgggcatccggctgccgctgttccaggccagtgcctttgcatttctggttccagccaaagccatactggctctggagagatggaaatgccccccggaagaggagatctacggtaactggagtctgcccctgaacacctctcatatttggcacccacggatacgggaggtccagggtgcaatcatggtgtccagcgtggtggaggtggtgattggcctgctggggctgcctggggccctgctcaactacattgggcctctcacagtcacccccactgtctccctcattggcctttctgtcttccaagctgctggcgaccgagctggctcccactggggcatctcagcttgctccattctcctgatcatcctcttctcccagtacctgcgcaacctcaccttcctgctgcctgtctaccgctggggcaagggcctcactctcctccgcatccagatcttcaaaatgtttcctatcatgctggccatcatgaccgtgtggctgctctgctatgtcctgaccttgacagacgtgctgcccacagacccaaaagcctatggcttccaggcacgaaccgatgcccgtggtgacatcatggctattgcaccctggatccgcatcccctacccctgtcagtggggcctgcccacggtgactgcggctgctgtcctgggaatgttcagcgccactctggcaggcatcattgagtccatcggagattactacgcctgtgcccgcctggctggtgcaccaccccctccagtacatgctatcaacaggggcatcttcaccgaaggcatttgctgcatcatcgcggggctattgggcacgggcaacgggtccacctcgtccagtcccaacattggcgtcctgggaattaccaaggtgggcagccggcgcgtggtgcagtatggtgcggctatcatgctggtcctgggcaccatcggcaagttcacggccctcttcgcctcgctccctgaccccatcctggggggcatgttctgcactctctttggcatgattacagctgtggggctgtccaacctgcaatttgtggacatgaactcctctcgcaacctcttcgtgctgggattttccatgttcttcgggctcacgctgcccaattacctggagtccaaccctggcgccatcaatacaggcattcttgaagtggatcagattctgattgtgctgctgaccacggagatgtttgtgggcgggtgccttgctttcatacttgacaacacagtgccagggagcccagaggagcgtggtctgatacagtggaaagctggggctcatgccaacagtgacatgtcttccagcctcaagagctacgatttccccattgggatgggcatagtaaaaagaattacctttctgaaatacattcctatctgcccagtcttcaaaggattttcttcaagttcaaaagatcagattgcaattccagaagacactccagaaaatacagaaactgcatctgtgtgcaccaaggtctgaaaaatgacttccaggaaaggaagcatggtatataacaggaaaagaaaactacatggggaaccagaagacctaagcctgaaatcccagccctgcccctaactaacttctgtgtaaactcagataagtcacctttctctgggattcaaatttttgcatcagttaaaaaaaaaggggtgggggggaatgggccaaagtctgagtcttagagacttgtaccaatgttatgctatgtctctaaatctttactctcctaagtagacttgtcagcatctaggaagaacagctagaaattttcctctgtgatattttagactgcaagttgaaaaaaataaaaagaaatgagggcaggttccagggcctgaaatgtaggtatgctgcaaggcttttacattgaatttgaccctacatcacttcaagactaatgcataatattaaacatcatgttgaagaaaaaaaaaaaaaaaaaaaaa

SEQ ID NO: 57572 - DNA, 3871 bp, Homo Sapiens
ctcgtgccgccagccaaccgcgcggccgcttgttgagccagggctccaccgtcgccatgacgcccggcaaacattccggagcctcggcccgagccgctaacgcaggagcttgggggtacagggacttcagaggcggccaaaaaaaggggtggtggaccactccccagctggtcgccaccatgccagtctctccggcaggcagtcacaagcagcagaacttcgggttgaacaatgccacacaaccaaagaagtctattagcttttttgctacaatgaaagcaacttcagtgaaaggatatactggtgcaaatcaaagcagaatggctgtgtccaaaaccgtgcttattccacctgaactgaaaactgtagaaaaaccaaatcccaatataaagacaacacaggtatttgacataaatggaactgatgttactccccgacctctttaccatccagatccacttactggtacagcaaaaccaagtaaactcttgacatcacaagaaggatcacttggatcagaatttatatcttcctatagcctttatcagaatacaataaatcctagtacgttagggcagtttacaaggtcagttttaggaagcagtacagtttctaagtcaagtgtatcagcaagtgaatcaatagcagaagacctggaagaaccatcctataaacgggaaagattgactagtttcacagatttgcaagttataagggcagcacctgaaaaaattgtaacaaaagaagacctggagaagaatatagagataatactcacagagacagaaacactgagattttttgacttgcccacagtcatggtctctgtagaatctgaagaagctgagaaagtaactcagagaaacaagaattatgaagtcctttgtagaaacagattaggcaatgacctatatgttgaaaggatgatgcagactttcaatggagcaccaaagaataaagatgttcaatgtgataaaatcataatggaagataaaggcataatgtccactgcctgggatttgtatgattcttacaatgctatggaacttgtatctttatcagtaaaacaatctgtggttgagtcaagtagtaaagcaaatgtacttcctaaagatcaggaccaaagattgccagggagcactacagaaaaaaatagtgaaactagttctctaatggacatagaaaatgtaattctggcaaaaatccatgaagatgaggaagaccactcagatgcaatattaaaatctgacaaatttcatcaggacttattttttatggaacgggttctgatggaaaatatatttcagcccaaacttgcagcttatcgtcagcttcctgttttaaaagaacctgaacctgaagagcctgaagatgttttagaaagtgcaaaacatgaagaggtagaggaagaatctaagaaggaggaggaagaagaaatacatgcagaagaatcaacaatacccgccaacttggaacgactttggtctttttcctgtgacttaaccaaaggcctcaatgtgagcagccttgcctggaataaaacaaatccagatcttttggctgttggctatgggcactttggatttaaagagcaaaaaagaggactggcttgctgctggtcaataaagaatcccatgtggccagaacgtatttatcagagtccatatggagttactgctgtggatttttcaattggagcacctaaccttttagccgttggctatcacaatggcacaattgcaatttacaatgtacggagcaacagtaatgttccagttctggatagtagtgaatcacctcaaaaacatttgggacctgtatggcaactacagtggatagaacaagatcgaggaacaacaggagatggcaaaagagaaatactagtttctatatcagcagatggaagaatctccaaatgggttatacgaaaaggactagactgttatgatttgatgcgattaaagagaactacagctgccagtaacaaaaaaggaggggaaaaggaaaagaaagatgaagctttgatatctcgacaggctcctggaatgtgttttgcttttcatcccaaggacacaaatatctatttggctggcactgaagaaggtcatattcacaaatgttcttgttcatataatgaacaatacttagatacctacagaggacataagggtccagtgtataaagtgacatggaatccattttgtcatgatgtatttttaagctgttctgcagattggggtgttattatatggcaacaggagaatgtcaagccatctttgagtttttatccagctacttctgttgtttacgacgttgcctggtctccaaaatcatcctatatatttgcagctgcaaatgagaacagggtggagatttgggaccttcatatcagcactttggaccctctgattgtgaatactgctaaccctggaatcaagttcacaaccattctctttgccaaacaaacagattgccttctggtaggagacagtgatggacaggtttctgtgtatgaactgagaaatatgcctactgttttggaaactggccggggagatataatggatactttgcttggatccaagtcaaaccaatcagcataattcatcattcctaatatttttcttgtagttgttttaaaaaaggaattaacatccaatattctgtattacatactgtacaccagattttgatttcagaaaacaatatttgatgtataacttccacttaatttaaatttaataaacttttatttcagagatatttgattagtttacaatctaagagttattcttaagagtttcagtggaattttcttaatttttctaaagatattcctactctcttgatcatattctaagtacatatgagtacatgtacattcttatacaatgtctaaatgggttagaaaattattatacctatagaagcgaaacttggaaattaatagaatcacttaaaccaaaatctttataagacacaattctattgattttaaagcttctgctttccaggctctgttttccagagtttataattacgtagtttttagtagatgaaaataatggattcttgtacctaacattttatcctcttagatctaagagccgaagctatagaactttgttagactatttggcaagcaaaatatatgacagtaaatatcagaattttatggtttgaccagcgcttatcacattcccaattcagtgagaaaaattcatctgggacacaacagggtactcttctctgtttgcccagaatcagctctggattttaagcccagacttcagtggacccagatagaaaatataaagtctctgatctataggccacatcaggatgttattttatgaagagttctagagcaaggttgcggaaatcggggtggagatggggagcagtgactcctccaaatattcattgctaacaggccattctatgcagtttgttttaacaaatcctgggttaaactgaggccacaggacatgatgggctgttctataaagcattctaagtggagaggagacgatagggcatatgaaattcactaaactctctggaaaaaaaatatgtatatattaaaaaccaagactggaatcagtgcaacagtgggaactaccttttacaagtatccattgcttcataaactccatttgtttggaccaatcccttaaacaaaagcaaggcaaattttacatggatttagagcctaggtcaggttattaggattataaattttccactggtatgtcattgtgattatctttgtttttgtctttctgaaagattggattttctataacaccttgtgtaagaaaataaaaaacttgatctaactgaaaaaaaaaaaaaaaaaaaaaaaaaaaaa

SEQ ID NO: 57573 - DNA, 3337 bp, Homo Sapiens; identical to SEQ ID NO: 30662

SEQ ID NO: 57574 - DNA, 2651 bp, Homo Sapiens
gtgtggaagtgacgctgcccccgctgcccaaaatgtcggcgcccagagggaggtagagagcccccacataccactgtattccccgccaccatggatgacgtccccgccccaacccctgcaccagcaccgcccgccgctgccgcccccagggtcccgtttcactgcagtgaatgtggcaagagcttccgctaccgctcagacctgcggcgccactttgcccggcacacagcgctcaagccccacgcatgtccgcgctgcggcaagggtttcaagcacagcttcaacctagccaaccacctgcgctcgcacaccggggagcggccctaccgctgctctgcctgccccaaggggttccgcgactccaccggcctgctgcaccaccaggtcgtccacactggtgagaaaccctactgctgcctggtctgcgagctccgcttctcctcacgctccagcctgggccgccacctcaggcgccagcaccgtggggttctcccctctcccctgcagcccggccctggcctgcccgccttgagtgcgccctgctccgtctgctgcaatgtggggccctgctcggtgtgcgggggctcaggggccggcggcggagagggccccgagggggcaggcgcgggtctgggcagctgggggctggcagaggcggcagctgcggccgcggcctccttgcccccatttgcgtgcggcgcctgcgcgcggcgcttcgaccacggccgcgagctggcggcccactgggcggcgcacaccgacgtgaagcccttcaagtgcccgcgctgcgagcgcgacttcaacgcgcccgcgctgctggagcggcacaagctgacccacgacctgcagggcccgggcgcgcccccagcgcaagcctgggccgcggggccaggcgcagggcccgagacggcgggcgaaggcaccgctgcggaggcgggcgacgctcctctggcttcggaccgcaggctgctcctgggccccgcggggggcggcgtgcccaagctcggggggctgctccccgagggcggtggggaggcgcctgcacctgcggcggccgccgagccctcggaagacaccctgtaccagtgcgactgcgggaccttctttgcgtcggccgcggccctggccagtcacctggaggcccactcgggcccggccacctacggctgcggccactgcggggctctgtacgcggcgctggccgccttggaggagcaccggcgggtcagccacggtgagggcggcggggaggaggcggcggccgccgcccgggaaagggaaccggcgtccggggaacccccgtctggctccggccgcggcaagaagatcttcggctgctccgagtgcgagaagctgttccgctcaccgcgagacctggagcggcacgtgctggtgcacactggcgagaagccgttcccgtgcctggagtgcggcaagttcttccgccacgagtgctacctcaagcgccaccggctgctgcacggcaccgagcggcccttcccttgccacatctgcggcaagggcttcatcacgctcagcaacctctccaggcacctgaagctgcaccggggcatggactgactgccaggctgcgtgcgccctgccctccacccagcctcctggactcggcctggaccaggggacctcgggactgcgcgtgaggccccggccctccaaatccaaatccagacgcaggccctgaaatgaggggaccctgactggagaggtgggggccaccaaaaacccacaaaggccccggagctgggggaccacaaacaaacagggtccttagctggggcaggggagcccaaatctagggagagactcctgagcctgaggtccctggaatgagtgtgggtagccgtaagtccccaagacatggggactttgcagtgagcaatgggtctccacaagtacctctcatcttgagagccctaatactaaaagatgggcacccacccccaccaagggaagactgccccattccctgagagccatcattcctaacgaccttgatctggagaatgtggagggagcatgtccctgaattttcctagatccctccaaatgccacccaccagagtcactggtgaccccagaaaatggatatagccgaaatctgcctttcccctttttcattccctgtgctgaaagagggaccagggtagatgccccctgccctcgaatcccccctccccgactgtggaatggatcgaccctaacgatcttccccgccccaaacactagaatagactggcctgaaatccccttgcccagtagaatggactgatctatgtgcacacacccccatcacatggaatgggctggtctaggctgtggcctgccaccttccttagagtgaatagggcggacactcctctcttttcctgtagcgtgtggaccggtccacgcaattctttatcctgtgaactcatctgagtgggaggtggtggacactggggtttccttccctctctccgtagcatccgttggtctttctctccatctctgttggtttgtctgtctctgtcttcctcccaatccctaggggaagggggcatttggctagggggtgcccctgtgagcctcgaccttgccccctcgtccctctccccagtgtttccaggacccccaataaaccttgtcctgtc

SEQ ID NO: 57575 - DNA, 1701 bp, Homo Sapiens
actggttgcggagtgagctgggcgcgcggcgcgcaggcgccctggggacccggtagcggcggtggcggtggcggcggtggcggtggctgcggcgacggcagaggcgaagggagccggatcgccgacctgagcgggaggcggcggtggcggccatggcggcagatggagagcgttccccgctgctgtctgagcccatcgacggtggcgcgggcggcaacggtttagtggggcccggcgggagtggggctgggcccgggggaggcctgaccccctccgcaccaccgtacggagccgcatttcccccgtttcccgaggggcatccagccgtgttgcctggggaggacccacccccctattcacccttaactagcccggacagtgggagtgcccctatgatcacctgccgagtctgccaatctctcatcaacgtggaaggcaagatgcatcagcatgtagtcaaatgtggtgtctgcaatgaagccaccccaatcaagaatgcacccccagggaaaaaatatgttcgatgcccctgtaactgtctccttatctgcaaagtgacatcccaacggattgcatgccctcggccctactgcaaaagaatcatcaacctggggcctgtgcatcccggacctctgagtccagaaccccaacccatgggtgtcagggttatctgtggacattgcaagaatacttttctgtggacagagttcacagaccgcactttggcacgttgtcctcactgcaggaaagtgtcatctattgggcgcagatacacacgtaagagatgtatctgctgcttcttgcttggcttgcttttggcagtcactgccactggccttgcctttggcacatggaagcatgcacggcgatatggaggcatctatgcagcctgggcatttgtcatcctgttggctgtgctgtgtttgggccgggctctttattgggcctgtatgaaggtcagccaccctgtccagaacttctcctgagcctgatgacccacagactgtgcctggcccctccctggtggggacagtgacactacgaagggagctggggtagttaaaggctcccggggcttctagaaggaagccaagcagctgccttccttttccctggggagaggtaggaaggaaccaggccctcacttaggtttggaggggcagataagagcactgctgaccatctgctttcctccaagggttctgtgtctagggtgaagtaggcaaaacgttgcccttaaaactgggccctgaagacggttccagccttgtccttcctgtgtgctccctgagagccattcctgtcccttacacattccagggcagggtgggggtgggtagccctgggggttcccctccctcttgtgcaccattaggactttgctgctgctattgcacttcaccagaggttggctctggcctcagtaccctcagtctcctctccccacattgtgtcctgtgggggtggggtcagccgctgctctgtacagaaccacaggaactgatgtgtatataactatttaatgtgggatatgttcccctattcctgtatttcccttaattcctcctcccgaccttttttacccccccagttgcagtatttaactgggctgggtagggttgctcagtctttgggggaggttagggacttatcctgtgcttgtaaataaataaggtcatgactctaaaaaaaaaaaaaaaa

SEQ ID NO: 57576 - DNA, 6200 bp, Homo Sapiens
acacaaaaagccttacaaatggaagaactaaggtggtacttaaaaacagcaccttaggatctagttccaccctatcttttcccttaaatgccatgacaaaagttaaaacgggccctgtcccttctgaatgctgggcttctcatctaaatttaaataaaaacctttgaagatgggaatgtgttggaagaaaagaagggcagaaaaaaagtgtgttggaagagtctgtggagtcctgaggcttggcgctcaggaagtttgcaaagctgcagcagctgccttggagaagaccagcaaagaaagtggagtgtgtatgtgaacttcaattctgtattttctgtgaggtgggttaatggatttttagtaaaaagaaatctcaaacacagctgacctgaaagactggaatttcagctctcttccttcccggggttctttttcctcccccttcctctcaaagccctttaaaccagattgctgtgtcagtgactcttatcctgcccgccagttccaagggtttctaactttttgtcttggaaaggaaaaccactacctgattagaaaagcacttgggaagcccattaatcttgccggcgttgtcaggagtgatcagcgagttttattaaaagccctgggattgcctgaaaggcccccttgtctgactttgaaatggaaggggcatgttaagatctcggggcacattgtcaggacccctcaccctgccccttggactatgagctgaccctccaggaggaagcacagaagccctcctttgttaaagggatttcgtcggtggacagagaagagttgggccctgtcagcatgaactctctgagttggggggctgcgaatgccgtgctgctgctgctcctcctggcctgggccagccccaccttcatcagcatcaaccgcggggtgagggtgatgaagggccactctgccttcctgtcaggagatgacctgaagtttgccatccctaaagagaaagatgcctgcaaagtggaagttgtgatgaatgagccaataacccagagggttgggaaactcactccacaggtctttgactgccatttccttcccaacgaagtcaagtatgttcacaatggttgtccaattcttgatgaagacacagtgaagctcagactttacagatttactgaaagagataccttcatagaaacttttatcctgtgggtctatctcctggaaccagactgtaacatcatccatatgagtaacaatgtgctggaggtgcctgaattcaatggcttgtcccaagcgattgataaaaatctgctcagattcgattatgataggatggctagcctggaatgtaccgtcagcctggacactgcgagaactcggctgccagcccatggccagatggttctcggggagcctcgaccagaagaacctcgtggagatcagccacacagttttttcccagagtcccaactgagagcaaaactgaagtgtccaggtgggagctgtaccccaggattaaagaaaataggaagcctcaaagtgagctgtgaggagttcctgctgatgggccttcgttatcagcatctggatcccccttcacccaacattgattatatctccatccaactggacctcacagataccaggagcaaaattgtgtacaagtcagagagtgcgtggctgcctgtctatatcagagctggaattccgaatcagattccaaaggctgcattcatggccgtgtttattctggaagtggatcagttcatcctgacctccttgactacatcagttctggactgtgaagaagatgagacccctaaacccttgctggtgttcaacattactaaagccccgctccagggctatgtgactcacctgttggatcacaccagaccaatctcctcattcacctggaaagatctcagtgacatgcagatcgcctatcagccaccaaacagcagccattctgagaggagacatgatgaggtagaattggaggtatacgacttcttctttgaaaggagtgcacctatgacagtccacatctccatcagaacagcagatacaaatgccccccgtgtatcctggaatacaggtctgagtctccttgaggggcagtctcgagccatcacttgggaacagtttcaggttgtcgacaatgacgacattggtgctgtccggctagtcaccgttggtggcctgcagcatggatggctgactttaagaggggggaaagggtttctcttcaccgtggctgacctccaggctggagttgttcgctatcatcatgatgacagcgactccaccaaagacttcgtggtcttccgggtatttgatggccatcacagcatccgtcacaaattccccatcaacgtcttgcccaaagatgatagtcccccgttcctcataaccaatgttgtgattgaactggaggaggggcagaccatcctgatccagggatccatgctgcgagcttcagatgtggacgccagtgatgactacatcttcttcaatatcacaaagcctccacaggctggggagatcatgaagaagccagggccaggactgataggctatcctgtccatggcttccttcagagggatttgtttaatggaatcatttattatcgtcattttggtggagaaatctttgaagattcttttcaatttgtcctgtgggacagccatgaacctccaaatctttcagtgccacaggtggcaacaatccatataactccagtggatgaccagcttccaaaagaggctcctggagtttctcggcatttggttgtcaaggaaactgaggtggcctatataactaagaaacagctacattttatagattcagaatcatatgacagggagctggtctacacaataactactcctccatttttctccttcagtcacagacacttggatgctgggaaattatttatggtggacagcataccaaaagtagttaagaatcctacggccctggagctgaggtcattcactcagcatgctgtgaactatatgaaagtggcctacatgccccccatgcaagacattggtccccattgcagagatgtccagttcacattttctgtcagtaaccaacatggcggtactttgcatgggatctgctttaacattacaatcctcccagtggacaatcaagttcctgaggcgttcaccaaccctctgaaagtgactgagggaggtcaaagcatcatcagcacagagcacattctaatttctgatgcagataccaagctggacaatattgacctctccctgcgggaattgcctctgcacggaagggtggagctgaatggatttcctctaaattcagggggcacattttcttggggcgatctccataccttaaaagttaggtatcaacatgatggaactgaagttcttcaggatgacctagtcttggaggtcaccgatggcacaaattcagcagaatttgtactacatgttgaggtattccctgtcaacgatgagccaccagtcttaaaggctgacctcatgcctgtcatgaattgctcagagggaggagaggtggtcatcacctctgaatacatttttgctactgatgtggacagcgataacttgaagttgatgtttgtgattgctcgcgaacctcagcatggggtggtgaggagagctggagtcacagtggatcagttctctcagagagatgttatctcagaggccgtgacatacaaacacacaggtggcgagattggcctgatgccttgttttgacaccattacattggtggtttcggatggagaggctggcccttttgtgaatggctgttgctacaatggacccaatccatctgttccacttcatgcgtcctttccagtgtatgatctcaacatcacggtatacccagtagacaaccagccaccttccattgcaataggtcccgtgtttgttgtagatgagggccgctcaacagcccttactgttaaccatttgtccgccactgaccctgacactgcagcagatgacttggaatttgttttggtttctcctcctcagtttggctacctcgaaaatatactcccttctgtgggttttgaaaaaagcaatattggcataagtatagattcatttcagtggaaagacatgaacgcttttcacattaactatgtgcagtccaggcatctgaggatagaaccaactgccgaccagttcacggtgtacgtcacagatgggaagcatcactccttggagataccattttctattataatcaaccccacaaatgatgaagctcctgactttgtagtgcagaatattactgtgtgtgagggtcagatgaaagagctggactcttccatcatcagcgctgtggacctggacattccccaggatgccctgctgttcagcatcactcaaaagccacgccatggcctcctcatcgatagggggtttagcaaagacttctctgagaataagcagccagccaaccctcaccagaaacatgcacctgttcacagcttttccatggaactcctcaagactggaatgaggttgacgtacatgcatgatgactcagagagccttgctgatgattttacaatccaattgtcagatgggaaacataagatacttaaaaccatttcagtggaggtcatcccagttaatgatgaaaaaccaatgctgagcaagaaggctgaaattgcaatgaatatgggtgaaactcgtattatttccagtgctattctttcagccatagatgaagactcacccagggagaagatttactatgtatttgaaaggcttccccaaaatgggcaacttcagcttaaggaatgtcaactaagatgtggaatatagcaattacctatgacggattagaggaagatgatgaggtctttgaagtaattctgaactcccctgtgaatgcagttcttggcacaaagacaaaagctgcagtgaaaattttggactcaaaaggaggacaatgccatccttcatattcctccaaccaaagcaagcacagcacatgggagaagggcatttggcatctgctgcccccagggtcttcctcatccaccacttctggttcctttcatctggaaagaagacctcttccatcttccatgcagctagcagtcatcaggggagacaccctgcggggctttgattctacagatctttctcaaaggaagcttaggacccgtgggaatggcaaaacagttcgtccatcctctgtttatagaaatggaacagacatcatctataattatcatgggatagtttccttgaaactggaggatgacagtttcccaactcacaaaaggaaggccaaagtatccatcattagtcagccacaaaagacaatcaaagtggcagaactgcctcaagcagataaggtggaatccacaactgactcacacttccccagacaggaccagttgccctcatttccaaagaactgcactctggaattaaagggactcttccattttgaagaaggcatccagaagctgtatcagtgcaatgggatcgcctggaaagcctggagtccccaaaccaaggatgtggaagacaaatcctgtccagccgggtggcaccagcactcaggctactgtcacatcttgatcacagagcagaaaggcacctggaatgcggctgcccaagcttgcagggaacaatacctgggcaaccttgtaactgtattctccaggcagcacatgcggtggctctgggacattggtgggagaaagtccttttggataggtttgaacgaccaagtgcatgctggccactgggagtggatcggtggtgaacctgttgccttcaccaatgggagaagagggccctctcaacgctccaagcttggaaagagctgtgttttggttcaaagacaagggaaatggcaaacaaaagactgtaggagagccaaacctcataattatgtgtgttccagaaaactctaaatataacagaccctacagggggccacctggagtttgtcacctatttattcacaggatctgtgaatattgctccatagaaaacaaattgttatgattgagtgggtatacctttgtgattctgtctagtgaaaatgggacatttttaatagtgccagaaagattgataaataaatattttttacaagataagatacaatttttgtatctcaataccttttaaaataaatgccagcagtattaaaaaaaaaaaaaaaaaaaaaaaaaaaaaaa

SEQ ID NO: 57577 - DNA, 3164 bp, Homo Sapiens
ggatttggtagccccgaagtgtgggctctctccagtaccagactcatttcagtaccagcctttgggaagtcgtgtgaatacctcggtctcttagccacagggatagaatggcggcctgacggagccgcggcgccggcgaagtcgctgaggcgcgagctggaacccccagaccagctcaaacgggagccaaaactcgaagcttggaagaattagcaggaaatggcggatgaggcgttgtttttgcttctccataacgagatggtgtctggagtgtacaagtccgcggagcagggggaggtggaaaacggacgatgtattactaagctggaaaacatggggtttcgagtgggacaaggattgatagaaaggtttacaaaagatactgcaaggttcaaggatgagttagatatcatgaagttcatttgtaaagatttttggactacggtattcaagaaacaaatcgacaatctaaggacaaatcatcagtatttagcatttacgtgtggcttaatcagaggtggcttatcaaacttgggaataaaaagtattgtaacagctgaagtgtcttcaatgcctgcttgcaaatttcaggtgatgatacagaagctgtagaacatactgaaatgcaaggcttcaacagtgtaaagagataaattattcatgtaaaagtatttcaagtagtgatgatttaattacattgttcgatgtttgtacaggagtaagcatgtatttttatcaatttaacacagatcaaaggagatgaagggacattctgccatgacatacacttaaccaaaactattcaaaatgaaaaccggatttcaaataaccagacaccaagatgcagggcccttattttaaacctttttatttggttagagtgatatgtatttagccatagatggagaaacaaagctcagggtttgttgaattagcatgagagaaaattatgtaccaacagaattatttgtgagaagaatgaacaaattttgataaagtatgaatttgttttattttaaaaagcaaacatactaaattttttttattttattgcttataatttattaagaatgtttacacctgtataaggatttcatatatacattgtatgtgtgtatatataaatacatatatgactgcctaaattgtttataaatttaatttttctttaataggtttcattccttcagagctccattaatgtaatcaaaatgaaatatagattagtttaaatgtgaattcagtgactctagggccaaagaatattaggtatgtttggaaagaatttttgtatttattcctgttacagttttgactttcaacttctctccccgtgcatggaagtcctggtaaaggatctaacatctttattcccttctttcctcttccagctgagcagagttggataattgaattagtcattctgacattctttggaccatatcatcttagtggtttggggtcagtgctcatctgatatatctttcttaccacctcttctacttactttctcttacttaaattatctggcataagcagttatctccagcttttgttagaatcttgcatgttgattactaaaactatactttgtttcccatttatttattacccttttgcatgtatttgtgtgacagggaactctgcagcagggggtgactgacacaccaaacaagatgtttcactgggtactctgccatagaaatggcagattaagaagattgactataccaaacattatattaaaaacacaaaataaaaactataaaaatgtactttaggacattaaagaaaactcaagttagaagcataccattttcctttcatggaagggtacagtattacaaagataatttgtttaacttgatttattaaattctagttatgtgccctataatgatgtttcagtcagtgacagacctcatatatggcagtggttccataagattacaatactgtatttttactgtaccttctttatgtttagatatgcaagtacttaccattgtgttacagtgtcctacagtattcactacaataatatgctgtacaggtttgtagcctaggagcaataggccatagcttaggtgtatagtagatcataccatctaggtttgtgtaagtacactctgtgattgtacaattttaaaatctcctaatgatgatgcatttctcagaatgtatcccctttgctaagcaatgcatgactgcaatcctaattctcacatgttttggggaaaaaattttaattttgaaaaaatttaggaaagttcctaccaaatatacatgtataaagtttattaaaagtcataatgacccaggaatagctaatgacacagaagtagatcaaaatagaacacaatagagaacttcaaaataaaacaggtgtgagaattgtgtgtgtgaaaaagctgggttcaaataagttggtttgttagacattcatatgcctacccatcagccatttcgttctcccttccttgctgacaaagccccattttttttttctttttttttggcctaaaactctgtatggctgccttgtgctatagaatagggtgcttccctagcctagagagggtgagtgttgattagattctgtgccaatcatggtaattggcttacttgatcatttgatggaatctaggctaacgagacaaaggaagtctgaaggctttgaataagaaattttctgttgctcttaacaattgatacaagttagggatttgccagcatccctcttctgcttctcagtgaagatatgtgatatggatgtttgaagctaatctgcaacagccttctgatggccatgaaaggacaagtatggagatgaaagctatcacactgagaatagtgggatgtagatagaaagcacctgaattgtgcttctgaattaaccaatccaggaactgctttacctttggactttttgttatgtgagatattctttatattgttccatttgctttgggtatatgtatattgttacttgtagccaaaaagaaacctctcttagtagaaacaaagggagagttaggttattcaaaaattagtatgggacaattgaatatgcctttttctgcgggagtaggtggggagaaacttaaaggttcacttgtaaaacaataaagtactaaagaaaatgtgataaaaaaaaaaaaaaa

SEQ ID NO: 57578 - DNA, 1568 bp, Homo Sapiens
gcgagaccaagtgcgaggggaggacaggcgaagcgcgcgtctggggccgcgctctccacacttagccggcgctgcctcacgcctcgcagccacccctcctgcgtctccacaaatggtccgacccgcaagcaagggggcgggtccggctttgaaaagccggcgggtcgggccttgaggtggaaggcgggaaaatggcggattcctcggggcgaggcgctgggaagcctgcaaccggccccacaaattctagcagtgccaagaagaaggataaaagagttcaaggtggaagagtgattgagtcccggtatctgcagtatgaaaagaagacaacccaaaaggctcctgcaggagatgggtcacagacccgagggaagatgtctgaaggtggaaggaaatccagcctgctccagaaaagcaaagcagatagcagtggggtcggaaagggtgacctgcagtccacgttgctggaagggcatggcacagctccacctgacctggatctctctgctattaatgacaaaagcatcgtcaaaaagacgccacagttagcaaaaacaatatcaaagaaacctgagtcaacatcattttctgcccctcggaaaaagagcccggatttatctgaagcaatggaaatgatggagtctcagacactactgctgacgctactatccgtaaagatggagaacaatcttgctgagtttgaaagaagggcagaaaagaatttattaataatgtgtaaggagaaggagaagctacagaaaaaggcccacgagctgaagcgcaggcttctcctctctcagaggaagcgggagctggcagatgtcctggatgcccagatcgagatgctcagccccttcgaggcagtggccacacgcttcaaggagcaatacaggacattcgccacggccctggacactaccaggcacgagctgcccgtgaggtccatccacctggagggagatgggcagcagctcttagacgccctgcagcatgaactggtgaccactcagcgcctcctgggagaacttgatgttggtgattcggaagaaaatgtgcaggtgctggacttactgagcgaactcaaggacgtgacggcgaaaaaggaccttgagctccgaaggagctttgcccaggtgctggaactctccgcagaggcaagcaaagaggcagccttggcaaaccaggaagtctgggaagagacccagggcatggcgccccccagccggtggtatttcaatcaagacagtgcctgcagagaatctgggggagcacccaagaacacgcccctgtctgaggacgacaacccgggtgcctcgtcagcccccgctcaggccacgttcatcagcccaagcgaagatttttcttcaagcagccaggcagaagtcccgccctctctctctcgttcagggagggacttgtcatgactcatggttacattcaggatacttgagcactttatatactaccgtagcactgtagctattttttatgtgataatcttgtttgataaaaaagtaaacctgttttgcaattgaagcctccattttctatgaaggggccagttggaa

SEQ ID NO: 57579 - DNA, 6334 bp, Homo Sapiens; identical to SEQ ID NO: 23858

SEQ ID NO: 57580 - DNA, 2096 bp, Homo Sapiens; identical to SEQ ID NO: 26499

SEQ ID NO: 57581 - DNA, 1092 bp, Homo Sapiens
tgtccctggaattctgggacactggctggggtttgaggagagaagccagtacctacctggctgcaggatgaagctggccagtggcttcttggttttgtggctcagccttgggggtggcctggctcagagcgacacgagccctgacacggaggagtcctattcagactggggccttcggcacctccggggaagctttgaatccgtcaatagctacttcgattcttttctggagctgctgggagggaagaatggagtctgtcagtacaggtgccgatatggaaaggcaccaatgcccagacctggctacaagccccaagagcccaatggctgcggctcctatttcctgggtctcaaggtaccagaaagtatggacttgggcattccagcaatgacaaagtgctgcaaccagctggatgtctgttatgacacttgcggtgccaacaaatatcgctgtgatgcaaaattccgatggtgtctccactcgatctgctctgaccttaagcggagtctgggctttgtctccaaagtggaagcagcctgtgattccctggttgacactgtgttcaacaccgtgtggaccttgggctgccgcccctttatgaatagtcagcgggcagcttgcatctgtgcagaggaggagaaggaagagttatgaggaagaagtgattccttcctggttttgagtgacaccacagctgtcagccttcaagatgtcaagtcttcgagtcagcgtgactcattcattcttccaacagtttggacaccacaaagcaggagaaagggaacatttttctacagctggaaagtgagtcctatcctttgaggaaatttgaaaaaagacatggagtggtttgaaagctactcttcatttaagactgctctccccaaccaagacacatttgcctggaaattcagttcttagcttaaagactaaaatgcaagcaaaccctgcaattcctggacctgatagttatattcatgagtgaaattgtggggagtccagccatttgggaggcaatgactttctgctggcccatgtttcagttgccagtaagcttctcacatttaataaagtgtactttttagaacatt

SEQ ID NO: 57582 - DNA, 1617 bp, Homo Sapiens
atgcaatcagtgtgggaaggccttcagtcagagctcaagccttttcctccatcatcgggttcatactggagagaaaccctatgtatgtaatgaatgcggcagagcctttggttttaactctcatcttactgaacacgtaaggattcacacaggagaaaaaccctatgtttgtaatgagtgcggcaaagcctttcgtcggagttccactcttgttcagcatcgaagagttcacactggggagaagccctaccagtgcgttgaatgtgggaaagctttcagccagagctcccagctcaccctacatcagcgagttcacactggagagaagccctatgactgtggtgactgtgggaaggccttcagccggaggtcaaccctcattcagcatcagaaagttcacagcggagagactcgtaagtgcagaaaacatggtccagcctttgttcatggctccagcctcacagcagatggacagattcccactggagagaagcacggcagagcctttaaccatggtgcaaatctcattctgcgctggacagttcacactggtgagaaatcctttggatgtaatgaatatggaaaagctttcagtcccacctcacgacccactgaagatcagataatgcatgctggggaaaagccctataaatgtcaagaatgtggaaacgccttcagtggaaagtcaacccttattcaacatcaggtaactcacactggtcagaaaccatgtcattgcagtgtgtatgggaaagccttcagccagagttcacagctcacaccacctcagcagactcgtgttggagagaaacctgctttaaatgatggctctaaaagatactttattcatatcaagaagattttccaagaaagacatttttaatgtgataaatgcagaagacagtttagcaactgttcacttgacattagaagataagatggcataatgaaagatatataaggtctaaatattactggcaaagtaaaataaatagttcagatgactactaaagtcaaagtcattaaatctggaagtaaacacgagaattcattctgggaaatcaggctgtctgtgtaaaggttactgctgtgctcaggagttgaaccgtgtggtgctgtatccggatactcatgacgaatggatggagggcgtgaaaagtgagcccagctggtgctctgggtctaccctacctgacatccttccagtcttatcctttgtttcctatccaggcccaggcttgtggctgagaacatccactttcagtcccatatacctgcctccaagtgtggtacagagaacttgggcctgctgggggcgcttagccttactctctccaccacctctcccaccaacccccagatgaactgcaggtagacgtttcttccttgcttggagccccagtttttgcatttcattttcattaaaatgaaaggtggtttggttttggttctaaggagctctacagtttaacagagagagggaccttaggggccaagaaagcaggggcctaccaagtatctccacttttgaaaattgtaattactgataaaaaattttttaaaggcaggtttattgaagcataatttataaacaataaaatttactctttttagtgt

SEQ ID NO: 57583 - DNA, 2342 bp, Homo Sapiens
ctggggtcgtggccgtgggccggcaggggcgaggcgggcgtccggagggcggataaaaggggccgcgctgcgccggggccgctttctccgcgcggtgcctgcagggctcccagcgagtggcagcttgggaggggccgcccgggcggtcagactggcacctgagcggccaccgcgtcccggccaggcgggcagaccgaccccctcctcacctcgcgcgcggctgacgcaggcagggcgcccggcccctcctggggaccatcaggtgccggctgggggctgtaggcaccggacggaagcaggcggtgtgaggaccgacgacgcgggcatggcgggggcggcctgcgagccggtggccaggccgagcctgacctccatctcgtctggggagcttcgcagcctgtggacctgcgactgcgagctggccctgctgccgctggctcagctgctgcgcctgcagcccggtgccttccagctgagcggcgaccagctcgtggtggccgggcccggggagccggcggcggcgcgggggggcttcaacgtcttcggtgacggcctcgtgcgcctcgacgggcagctctaccgcctcagcagctacatcaagaggtatgtggaactgaccaactactgtgattataaagactacagggaaactatattgagcaaaccaatgttgttctttattaatgtacagaccaaaaaagacacctcaaaagaaaggacgtacgcgtttcttgtaaacacgaggcaccccaagataagaagacagatagagcaagggatggacatggtcatctcctcagtgattggagaaagttaccggcttcagtttgattttcaagaggcagtgaagaatttcttccccccaggaaatgaagtggttaatggagaaaatttaagctttgcatatgaattcaaagctgatgcattatttgatttcttctattggttcgggctcagtaattccgttgtaaaagtaaatggaaaagttctgaatttgtcaagtacaagtccagaaaagaaggagacgattaagttatttctggaaaaaatgagtgagcctttaatccgaaggagcagtttctctgaccgaaagttcagtgtaacttccagaggttcaatagatgatgtttttaactgcaatctgtcacccagatcatctctgacagagcctcttttggcagaattaccatttccaagtgttctggaatctgaagagacacccaaccaatttatctgattgaactgaacattgtagcagttgctcccgcactccaggcctgtgctagactataggctggggggagggtaggaggtgggaggcagatacttccacctgcgtgtcaatctccggctcctccatggcttctatggaggactcctctcttctgcttctgtggatgtgatgccctggcaggcccagggcagctgattcccctaaaacttatgattaccaggatggaaaggccttggtcccatggcactgggtggggctgggggatattctctactttgaacacttctccaaagaggcagaagggccacagagttctgccaccctgaacatttttctcagttccctgggagtttttgtggcagcctttgtgggagtggtctgactggctgttgacctagcatgcttcataaatcagggtttggccctctgcttggagcatccaaccccttgaactcaaacctgtcgagcaaggggttaagagttctgttctcttgccaacctggctgggcaaaagcctgtgccatctttcactgggaggcaaatatgtttttcatcctgccatatgacacctatgagaaacgttcacagtgaggagtagccaggttgctaggacagtaaccctgccacacactgcctgaaatcggaactcccttggcctccctcttaactaagtgacccatgtagaaggaagccaggagatatggtaccgaacaatgacaggggaagggtattggacacggcagcgtcctccttattgaaaacacattatgtcagttgggaattttaaataagcttttagcaaacctaacactaaaagcaaaatagaagaaagctataccattaccataatacatttttcatctcatggctacaatggaattcttgaaaaggaaaaaaaatcctatctacatataaaaacctgcatgaatgaatcactacatatgcttataatgaggaagagttatgggtcctgagtgtaattttttatcctttcttaaaaagtttctgtattatgcattttgataacactactgatgatccttccacttatatttgaaatgttatgtaccacatttgcacaattaaaacttttcttagcgttcaacct

SEQ ID NO: 57584 - DNA, 6122 bp, Homo Sapiens
gagggcataattttttctcaattcatatttgcaaattgtttattgagagtcagtgttgtatagagggataaacatagatttggagatacagtcacttgccaagttgcaccgcagattcctctggtataaaatgaaaataatgtgactctacaggattgaataataattaactgaagtagtatatatagtacccatcacagaataggtttgtaacaaatgttaggtttgtaaaaatgttttgtcctgtcataattttaaaataggtaaattggacattttctgtttttctttataacataaatccgatattcacatgcagtttttttccaacttttattttaagttcatgggtgcatgtgcagatgtgaaggttcgttatataagtaaatgtgtgccatggtggttttgctgcacagatcatcccatcacctaggtattaagcccagcgttcattagcaattcttcctgacagctgcagttttgattatgtgcagctctcaattggcttttccccgtttaagatgttagaccagtggttctcagccttgactaattagaatcatgtgaggagcttttagaactcccattgctcaggccaaccctccaatcaattaaattaccatctctgggacttacacatttgtgttttgttttctcttttttgactccctaagtgatttttatatggagccaagattgaaaacagtgttagacacacactttcccaatttatgctttgaaaacaaagaccttagttcagagacttatgagatagggttatgattaggggaagagtaggccccacaagtttcagggtagtgaagattctgaagggtacaagcgataaaggagcctgagtttctgggtgaactcagaaacaaggaatcctagaagggctgagagcagaacagaacctcggaatagtctctgaaataaaagagtggagagtataagaaacagaatggaggcaggccccaggaggattcaatcaggaattctgaccttggggccataaataggtttcatatcttcacagaaagggtttacacaacttttgtatatcattttctgagatgtctgaatcctagaaaaagataaagaacatcagtatgtgaaaaagccaagggctaaggtaatggtaatcagactacagttctagaaatgcctctggatctttaatacatgactggcagctcttctaaacctctatgttacctctattagaatattatttctgatgtagtttgtggagaaacaaagcaggaatggaggagaacactgtatacagtatactttataagcactaaataaatatgtaaaaactctgaaatataatctgagtttatagtcataatgaagattattagctcaataatctagggtagaggtgtccaatctttcggcttccatgggccacgttggaagaagaattaccttgggccacacataaaatacactaacactaacaataactgatgagttaaaaaaaatcacataaaaatctcataatgttttaagaacatttgtgaatttgtgttgagtcacattcaaagacaccttgggccacatgtggcctgtgggctgcaagttggacaagcttgatctagggcaagtgctcaacagtggctgcacagttaaatcgtgtgtaaagctttcaaaaagtaagggtgcctaattccactcctagagattctgatttaattggtctgacatggagttgtaacatcaatatttttgaatttttccatatgattctaatgtgtaaccagcattgagaaccactaatccagaggaaaccaggactcctgcttatcttgcacaacttgggtaccctcaaaatatatggtattggcaaagttaatctgagcctaagttccagcacctgtaaaagatggtacgaatttcctaaaagaggttgttgtgaatatgtactctcctgggtttagtccttagctttgcaagaagtccaaaatcttcaagatgatcagcctcaaatcagggactcactaaccgcaaacaaacttgaaagtggctgataactaactggaaagatattactttaatatgtttctcacaaagcctgtgataatcatttgccatatttgtgatcatagaaatttcttgtccctgccctagaaacattgaatcatgttctccaggggagagcctgggaatctatatttttaactgacaccccagttgatttttatcaaagaagtctgggaaacattgtactttaagttattgtattgtcattctggtattgatttatggtaagaggagatacatatttccatttcctagtttttcttgatgtctgtcatccagggtatccttttcttggtatcaaagaatatgaaaaaccaattataatcagaaagtgacttagtatgcatgaaattagagcatagaaaaggatagttttgagggaacatttcattcatattttgacataacctgctgagttttcctgggcccgcaatagccagtagtgtgcagcctcattttcttcagagtcagcatctttctttccccttgcaagcagtctcctgtttctatgaatagtctttgctcagacaaggccaatatacttggtaataattaatttagcttctttgaaatgattaggtcactttttggtttaaaagattaccatggttgtccccaaaatctttgcatgtaccaatttatttcctcctccctagggtcagaatgattttatatttggcttatgaaatgtattaatttgcttcttctggtcaaagataaagtggaaggatgatgagatttttaaaaaattaatgtatcccttgcttctaattctacctacaaagtggaatagtgtgctagttactatatagttcccagtgtatagcttttgactcttttgaagtggtaactagtagttttgttttagaattttgctttcagcttttatcctgagagtggggctcactgaacctctctcctttctaaaatctgtggaaattacttttggtaactaaggcactgcagtgatctcaggtaagagagtaaaaaatttgcctttatttgtttttaatgttttgggacgtttcaggttttggttgggtggaaacagagttggggcaaacaaaaagaggctggttaagagattcagaggcaaaggttggttggccatgctaaatttcaggtgcctgttgcacctccatgtagcaacagtaagtagacagatagcagattcttagggaagaagttaagctagagaagcagtgtggtgtggtgtaaagaattctgggcattcaattaagaggtgtgggctctgagaggctaacactactactaacttgctctgtgactttgaccaagtcatttgacctctctgggccccatctttattggaaaatgtcaagtagatggtctctaataaatttttggtccagttctaacattatgtgattctaaatgtatttatactgaccttcttaacttgaactctttgttttttcagcatttagtatgagaacctatgtttgccatatttgtagtattgcttttacatctttagatatgttccggtcccacatgcaaggaagtgaacatcaaattaaagaatccattgttatcaatctagtgaagaattcaaggaagacacaagactcttaccaaaatgagtgtgcagattacatcaatgtgcagaaagccagaggactagaggccaagacttgtttcagaaagatggaagagagttctttggaaacccgtagatacagagaagtggtcgattccagacccagacatagaatgtttgaacaaagactcccatttgagactttccggacatacgcagcaccatacaatatttcacaagcaatggaaaagcagttacctcattcaaagaagacatatgactctttccaagatgaacttgaagattacatcaaagtacagaaagccagaggactagatccaaagacttgtttcagaaagatgagagagaactctgtggatactcatgggtacagagaaatggttgattctggacccagatcaagaatgtgtgagcaaagattttcacatgaggcttcccagacctaccaacgaccataccatatttcaccagtggaaagccagttacctcagtggctaccaacccattcaaagaggacatatgattctttccaagatgaacttgaagattacataaaagtgcagaaagccagaggactagagccaaaaacttgtttcagaaagataggagatagctctgtagaaacacacaggaacagagaaatggttgatgtcagacccagacatagaatgttggagcaaaagctcccatgtgagactttccagacctattcaggaccatatagtatttcacaagtagtggaaaaccagttacctcattgcttaccagctcatgatagcaaacagagactagattctattagctactgtcaactcaccagagactgtttcccagaaaaaccagtacccttgagccttaatcagcaagaaaataactctggctcatacagtgtagaatctgaagtttacaagcacctctcttcagaaaacaatactgctgaccatcaagcaggtcataaacagaaacatcagaagagaaaacgacacctagaagaaggcaaagaaaggccagagaaagagcagtccaagcataaaaggaaaaagagttatgaagatacagatttagacaaagacaagagcatcagacaaaggaaaagagaggaggatagagtcaaggtcagttcaggaaagcttaagcatcgaaaaaagaaaaaaagccatgatgtaccctccgagaaagaagaacgtaagcacaggaaagagaaaaagaaatctgttgaagaaaggacagaagaggaaatgctttgggatgagtctattcttggattttgaatgtttagttttgtttacccaaggttgaattgaaaaaaaaaaacagtcaatatggatttagaaaaaggaacacctgatgaagaaaaggagaggtagatacagtcagtgtcacttcaggacacttaggttttttttgtataaaaatttaaattgaattaaaagaaggaaaaaaaaagcccaaacttaacctctgagaaaagaacataagaactcaaggagaacataagagaaaaggaaacctgttacagaaaagacaagaatctgtgttttggaatgagtctattcttgggtattgaacttttagttttgtttgcccaaggattaattgaggaaatcagctaagaaaatggactttagacaaaagcaagaggatcagatgaagaaaaggagaggtagatacagtcagtgtcacttcaggaaagctatttaaaaaaacttgaaatttaattgaaagaagaaacaacaacaaaaaagcctaaacctagcctctgaacaacactaacatgagaacacaagaacttaagagaaaaagaaacctactcaagaaaagacagaagagacagtgatttgggatgagtctactctaggattttcaactttttagttttgttccttcaaagttgaaggaaaaaaagtttggttttataaaattcatgttattgtaatttttctaggtggatggctactttaatctctaaaaaagccaagtgaagtaaaagtattcagtatgccttttcctcaagttactttccttcattttcttaaaaaagaaaaaaaattattaaatgtttctcacatatctcacatataatgtaatttccctaaatgaagttgtctctacttctgctcatcaaattgctgtgatagtgaattatttattcatgggagataatttattttaaaggacagaattaccaagcgttacaaaatcagttctttccttggttttgtgttagtgttggtggtattttattgttgtttttctgtgtttatgtgtctcagctttctccaaggaatatgtatgaaataacttaaactgattttttctttgttaaatctaatttgcagtgtatttttgcattttctagttctgaaagtggaaaatgaaacagtctataataaacttagatgatatatagttttaaaacggtctcaaaaagtactgatataaggtcagtctatattctggaaatgtttatattaaagtgttttaatttcta

SEQ ID NO: 57585 - DNA, 2020 bp, Homo Sapiens
gctccctggctggccggtttgagcgtctgggccgtgaaggtgggacctcctgttccgggccgcaagtttccctctccagccgcccgccgttcgtagcatgtcccccagaactcggggagcgcaggcaggacaggcttagagaagacgcggtccccagcgcttgggccacggacgtcccaccccgctcctctgtcgctggagaaccgccgggccgagccactgggagaagcaggccagagccttccagggcctccggcccgtggacccgaggaggatgagctggctttttcccctgaccaagagcgcctcctcctccgcggctgggtcccccggtggcctcaccagcctccagcagcagaagcagcgcctgatcgagtccctccggaactcacactccagtatagccgaaatacagaaagatgtggaatacagattgccattcaccataaacaacctgacaattaacattaatatactgcttcctccacagtttcctcaggaaaaaccagtgatcagtgtttatccaccaatacgacatcacttaatggataaacaaggagtgtatgttacctctccattagtaaacaattttacaatgcactcagatcttggaaaaattattcagagtctgttggatgagttttggaagaatcctccagttttagctcctacttcaacagcatttccttatctatacagtaacccaagtgggatgtctccttatgcttctcagggttttccatttcttcctccatatcctccacaagaagcaaacaggagtatcacttctttatctgttgctgacactgtttcttcttcaacaacaagtcataccacagccaagcctgccgctccttcatttggtgtcctttcaaatctgccattacccattcccacagtggatgcttcaataccgacaagccaaaatggttttgggtacaagatgccagatgtccctgatgcatttccagaactctcagaactaagtgtgtcacaactcacagatatgaatgaacaagaggaggtattactagaacagtttctgactttgcctcaactaaaacaaattattaccgacaaagatgacttagtaaaaagtattgaggaactagcaagaaaaaatctccttttggagcccagcttggaagccaaaagacaaactgttttagataagtatgaattacttacacagatgaagtccactttcgaaaggaagatgcaaaggcagcatgaacttagtgagagctgtagtgcaagtgcccttcaggcaagattgaaagtagctgcacatgaagctgaggaagaatctgataatattgcagaagatttcttggagggaaagatggaaatagatgattttctcagtagcttcatggaaaagagaacaatttgccactgtagaagagccaaggaagagaaacttcagcaggcgatagcaatgcacagccaatttcatgctccactatagattttcctggaaacatgaactgccaagagaggaatgggacacaaaaccaaacactgttttatatttatggtttgcaaactggcatttcatcagtggctaaattcacagatatcctatatagattgtatacagaactgagactgattttgtaccgattagaatgattgctatgatctttgagaaatttttctgcactatttgcactgaaatgtttatttattgttgataaattgtatcatatttaagttccactgctgttcctcttaccttgattaaatgcctatgcatgtacttttagctagtttttaatattttataaaacttcatttaaatttgtatttttaacttgaagttccatttctttatcaaggatggtatttagatttttttcctcttaaccttttttcaaaaactattttcaactgtgaggaaacccttatttttctttctttgtggataaaactttcaaaagcaatttaagatattcatagtgttaggaaacaccaaacctgcctatgtgccatctcacaaaagaaacttttaatacctaca

SEQ ID NO: 57586 - DNA, 4300 bp, Homo Sapiens; identical to SEQ ID NO: 31745

SEQ ID NO: 57587 - DNA, 3145 bp, Homo Sapiens; identical to SEQ ID NO: 31497

SEQ ID NO: 57588 - DNA, 3250 bp, Homo Sapiens; identical to SEQ ID NO: 26254

SEQ ID NO: 57589 - DNA, 3254 bp, Homo Sapiens
ggcggcggccgcgcgctgctcggggcccgactgcggcgcgagggcggcgcgggagcgacgctggcccggaccgaggaaactatgccgcagacgtccgttgtcttctccagcatccttgggcccagctgtagcggacaggtgcagcctggcatgggggagcgtggaggcggggccggtggcggctccggggacctcatcttccaagatggacacctcatctctgggtccctggaggccctgatggagcaccttgttcccacggtggactattaccccgataggacgtacatcttcacctttctcctgagctcccgggtctttatgccccctcatgacctgctggcccgcgtggggcagatctgcgtggagcagaagcagcagctggaagccgggcctgaaaaggccaagctgaagtctttctcagccaagatcgtgcagctcctgaaggagtggaccgaggccttcccctatgacttccaggatgagaaggccatggccgagctgaaagccatcacacaccgtgtcacccagtgtgatgaggagaatggcacagtgaagaaggccattgcccagatgacacagagcctgttgctgtccttggctgcccggagccagctccaggaactgcgagagaagctccggccaccggctgtagacaaggggcccatcctcaagaccaagccaccagccgcccagaaggacatcctgggcgtgtgctgcgaccccctggtgctggcccagcagctgactcacattgagctggacagggtcagcagcatttaccctgaggacttgatgcagatcgtcagccacatggactcattggacaaccacaggtgccgaggggacctgaccaagacctacagcctggaggcctatgacaactggttcaactgcctgagcatgctggtggccactgaggtgtgccgggtggtgaagaagaaacaccggacccgcatgttggagttcttcattgatgtggcccgggagtgcttcaacatcgggaacttcaactccatgatggccatcatctctggcatgaacctcagtcctgtggcaaggctgaagaaaacttggtccaaggtcaagacagccaagtttgatgtcttggagcatcacatggacccgtccagcaacttctgcaactaccgtacagccctgcagggggccacgcagaggtcccagatggccaacagcagccgtgaaaagatcgtcatccctgtgttcaacctcttcgttaaggacatctacttcctgcacaaaatccataccaaccacctgcccaacgggcacattaactttaagaaattctgggagatctccagacagatccatgagttcatgacatggacacaggtagagtgtcctttcgagaaggacaagaagattcagagttacctgctcacggcgcccatctacagcgaggaagctctcttcgtcgcctcctttgaaagtgagggtcccgagaaccacgtggaaaaagacagctggaagaccctcaggaccacccttctgaacagagcctgaggcggatgcagcccgcgacgccagaggaagcacgtgcactaactgggtttaaattttgactgatgtgggttgagatgaggaggcctcactggttggggtccattttgtatataacttttatgagaaaaaaatggtaattatttcacgcatcaacctttggcacttacaaagttttttttgtttattttaaataacagggcagggccctgctttggggagggggaggggagagtatcatgggagatggtatccatgataacatcttattctaatgaaatgtagatttttattttctacttttgattattgacatcttatgaaaaaaatattttaaaaaacccagccaaaaccaacgtgagccctgcctgctcggacgcctttccagccagtgtctctgacgtcggggttagtgccttagagggtactggggtctggtcttcctgctctgtggtttgggctgcggtgagtcccactccacctgggcgcctgccctcaggagcctgggctgcgaggctccataggagggctggtggctgggaggtcgcgtccgcacacttctggaagtgagcctttgagtacgggctgtccaaagtttacattttcattttcctttcagggatttgcggggtcagggaggggcagggggcacctggcagcatattttctgtgacaatgtgtccagcaaatcattcttcaactacattttagaaaggaggaaatctaaaataaggtaagggagggaagcatggagttgtcagttttctgggctgtgactgaaagacacactgagctgtgatgaagaaaaatacatggccgactccagggtggtgacatttagagctagtcttgaaacctatcatctacagaggggagggcagccaacagccctcttcccacctgggtaggcagcgccctaattggaattggaaacagaaaattcgccaggccatactgctggagcccattcagataaaactgcccaaatactgagaggtgttttctacacccagctagaggagcacactccattttcccatgtctgacttcgtggtgtgagccctgggccctactgaccatggcgcaggacagctgtccttcagaaagcacacggtcaatccacgtggaccgtctccctcgcaggaactccgcatccttgtccctctctgcattcccagtttccgcaggagccttgatcaatggggaagcctgggtgaggatgggccaggtcccaattcccaaagctcctggaagagcctgaagacattgggaaaggctgggcctggggaggaggcagccctgggcccgttgcccatgcctctggtcctgggtggagcaggaatagttccactgtattgtcacagtgtgtttgcactttctgaggttctagctagtacagattgtatattgatagtacatattgctttgtttatgtctttgagatgagaaaggcttaaaacttgagaatatatatttggaatacagccttagaacggtttctgtacacatccacgtgcacttcacgggtgatcagttctagtacctacttgaaacagtgtctgtctgctactttattttcccaatttgatacataccctgatttgatgttttggtatttgagatgaactctgagtatgaagctgtaccataatgcagggcgtcagttttggtgtgactggacatacttgcttcaataaaagaatacatcactcccaaaaaaaaaaaaaaaa

SEQ ID NO: 57590 - DNA, 3054 bp, Homo Sapiens
cgaaaagctgcggttaaggagagtccggtttaaccgtcaccgggaagcgcgctcgttcgggatcgccgagggggctgagatagtgaattcctaagaagaaaataatggattgcatattagttgttctctaagtggactcaacagtgtgcaagcttgttggaaaagccaaaagaagatggcaactccttatgtcccagttcctatgcccataggaaactctgcttccagttttacaacaaacagaaatcaaagaagttcttcttttggcagtgtctcaacaagctcaaattcttctaagggccagttagaagactcaaatatgggtaattttaaacagacaagtgttcctgatcaaatggataatacttcatctgtctgtagcagtcccctcattaggactaaatttacaggtacagcttcttccattgagtattctactagaccaagagacactgaagaacaaaatccggaaacagtgaattgggaagatagaccatctacacctactatactgggttatgaagtgatggaagaaagagctaaatttactttaaaagagatgtttccaggttttcgactagcacttcctccaaaacgctggtttaaagataattacaatgctgactttttagaagacagacaattaggattacaagcgtttcttcaaaatttagtagctcacaaggacattgctaactgccttgcagtgagagaatttctttgtttggatgatccaccgggtccatttgatagcctagaggaaagcagggcattctgtgaaactttagaagagacaaactaccgcttacagaaagaactacttgaaaaacaaaaggagatggaatcactaaagaaactgctcagtgagaagcaacttcatatagacactttagagaacagaatcagaacattgtctttagaacctgaagaatcactggatgtgtcagaaacagaaggtgaacagatcctaaaggtggagtcctctgcacttgaggttgatcaagatgtcctggatgaagaatctagagctgataataaaccatgcttaagttttagtgaacctgaaaatgctgtatcagagatagaagtagcagaagtggcatatgatgctgaagaagactaatgtatcacaagcagttccctccatttagactattcaaaaatttagaagagtggcaaatactattttaaaagaagaaccaagaactgtaaaacatatagaaaagagcaagaatgcacatgtataaagtttacataaagaagtttttttaagttattgagataggaaatatattcactgctgcttttaattgtattttatccaattacatttaatacactaaaaaaaatcttgttggaattctgttatcaaggcccacattcttaaatactgtgcataaattattatggtgttttgcctatatattgctccaaactactgtgtatatatgtatgtgtgttaaatcaccaattatattaatcaaatggaaattaattgcatgttactatctgggtgatatattcttctttatatctctgacatgacatattttcattaatagtttaaatcagtgaccatcataataaagataaaatttagttgagtttttaatgtttacatgtttacatctttaaataaaatttgcttatttgaaatgttaatgctctttagaaaaatgactttctagtaccaaaggaaaactacttgaaagagctgtaatcatatagctaaagtgataagatagccttgattttaaaagctgattcattaatatcaaaatactttaataagtgtcacagttattaatatgttacatttgtttagtttccacgtaatctttatctctacctagatttagtgagtttgcctctttcagaatactacctccttttgttaaggcatattctttcgaaaatatagattctaaataaataggggcttatacaaaaaagaaaataaaaagccatatatactgcaaagttcctaactggcttgactcctgacattgcatttttatttctatttgtgtgaagatgttgttatactgtattatggctgattttctttttaatatatttagccaagtgatgcactttatgataattaaactcttttgtgccaagtttaattggtggatttttttagtaagtagagttaggagaaagaattatgtagtgcctttactatttcactttctacaaaagtctcctagggtctttgagtcagctttatgaaaaaatgtttgtttatttcagctttgtgtacagtcattaaaagtgccttgtttcatttttataggatgaagttatttattttctattttcactgttttgcatattgctgttaataagcattgtaatcatgctggcattttgcaatcccagtcggtatgctttctaaaaactgagggaaacttactggggaaatagaataacaatctccatttttttctttactatctaaaagtttatcggtatcttgatgtatatatatattaaggtgtggctgtttaaaattctaatgacatatatcaacacattcaatggctgttgttaacctttgaagtaaaaaggagatcactttttaccaaataaccaaaaatttttagtctttgtcaaagtgcacaggtatgttctcagaacatttttcacaatgtgtatcagaaatatgtttgctatccttagagacagaaatgaatataacaaattgatctgcttatttattaaaattattattctagacttacaaaaggcttaaaaagaacaatcatttaatcagtaccattctgtatcttatataacagatctttgccaaattctagatattatagtgttgcctgtctgttctaaagcgaaccagccactttttcaatctggctttttggaagattgtatttaaagttcttcaaggatgaagaaaaaaatctgttaattaggtaaaccactattatttatatttataatttacttttttttacttttataatgcattttactcccagtattatgttcatttaataaattattttttcactacaaaaaaaaaaaaaaaaa

SEQ ID NO: 57591 - DNA, 2161 bp, Homo Sapiens; identical to SEQ ID NO: 31348

SEQ ID NO: 57592 - DNA, 3467 bp, Homo Sapiens
ggcagggcggcggcggcagcggcgcagctccgctccccgcgcgtctcccttccccgcgcccaggtagggcgctcagcctccgccgccaggatgcggccgcccgcctgctggtggctgctcgcgccgccggcgctgctcgcgctcctcacctgctccctggcttttggtttggcttctgaagatacaaagaaagaggtcaagcagtctcaggatttggagaaaagtggtatatcaaggaaaaatgacatagacttaaaaggaattgtattcgtcatccagagtcaaagtaattcttttcatgcaaagagagcagagcagttaaaaaaaagcatcttaaagcaggctgcagatcttacacaggagctccccagtgtcctcctccttcatcagctggctaaacaagaaggtgcatggaccatacttccgttgttaccgcacttttctgtaacatatagcagaaattcatcttggattttcttctgtgaagaagagacaagaatacagattccaaaactcttggaaaccctcagaagatatgacccctctaaggaatggtttttgggaaaagcattacatgatgaagaagctacaataattcaccattatgccttttccgagaatcctacagtttttaagtatccagactttgctgcaggctgggccttaagtattccacttgtaaacaagcttaccaagagactaaagagtgaatccttgaaatccgactttacaatagatttaaaacatgagattgccctctacatctgggacaaaggcggaggacctcccctgaccccagtgcctgagttttgtaccaatgacgtggacttctactgtgctaccacattccattcttttctaccgctttgtagaaagccagtgaagaagaaggatatttttgttgcagtaaaaacatgcaagaaatttcatggtgacagaatgcctattgttaagcagacttgggagagccaggcaagtctcattgaatactatagtgactatactgaaaattccattcctactgtggatttgggaattcctaatacagatagaggtcattgtggaaagacatttgccattttggaaagatttctgaatcgtagccaggacaaaacagcatggttagtcattgtggatgatgatacattaataagtatctccaggctccagcacttgcttagctgttatgactccggcaagcctgtgtttctgggagagcgctacggctacggcctgggcactggtggctacagctacatcacgggaggaggaggaatggtcttcagcagagaagccgtcaggagacttctcgccagtaaatgtcgatgctacagcaatgatgctcccgatgatatggtcctgggaatgtgctttagtggcttgggaatccctgtgacacacagccctctcttccatcaggctcggccggtggattaccctaaggactacctttctcatcaagttcccatatcgttccacaaacactggaacatcgatccagtgaaggtgtatttcacatggttggcacccagtgacgaagacaaagccaggcaggagacacagaaaggttttcgagaggagttataaatcagggtgacctgtgcgcctagcctgctcagggagtgaactggagactgtggcctcatcccactgtgctgtgctcacaacacttgtgtctgccacatggcattgggtgcttcctgactttagggggagattttatgtatggtattttttgacagaggaagaaaaggggtcacaggagaaacatttttttttctgggaaaaatcacttgcttttgacttatgcagttgttttaacacttagtgatgactgtgtattctccaagctgtgatacagcagtttttttttattgtcacagggaaataaatggtaccagaagtccctttcctgttctgtctcttcattgtaatggaagtttcagttgggcatgagcctggagagatgtgactgtctacagttctatttgtatatataaaaagaggactgaaagtcttttgacatggatattgtgaatggtatgaacttttaaaccatattattgatgatgaaaattatttcctgggaactcagtaggaataataccgtattaaggaataatactgtacataaaacatcatgaaaccctagatatgaaatcccctgaagtctgtaatcatggtggttatgttttgtctattcttttgctgtttgtgcctcataaaaagagaatgaggtcttctgctagagcttcgtattgctttggaagttcatctgtgttttatttctccctgaagccctatctttatggcttacttgtaacatgaaagtagtagatgctgccagaaaatagtgtcctcaatatttaaaacaatgttgacatgttttgttcaagtcagcaagctctatgtgagtctcaggaagtgaattaaatttggaccttatgttttactcttgtttttttttttttttttgaatgttacttaatgactctctcctgactcaggagagaaaccccttgtggaaggacagcatggtgatcaggcaatttctctgggttcccaaagaatgacatttgaacacagtattttgaaacagctctagttttcaaattatatctttaatatatagtaatgtaacatattcagtattaatgtataaaaagcactctaattatataattcagtttttgtaaaggtatttgcataaaatttaatatgtcttaaactaattttggtaaattacttcttttttttctttttaataaaaactgttactcattaactttgcttataatgctttttatagcccagcacagaatttaaagccataccaccaaaagtacctgtgtgtgttaatatgtttttcttgtagcatagattgactatttgcaatagtattagtatttaccatttttccaaattagcaactaccagacctcacgtgttgcagtgataacacaatgcattggattcagttttgtgaaaatggattctgtggccatccaagggatgtatcagggatgatcagctgatgagaggctccagaaggatttctagatcgcttcaagcctatactgatggccttagctttgttcagtcattgtaactgggattgttgtcattgctaccgtggtagtcaccttcatgtcatctataatagtactcctggagagccctggctgcctacaccagtggaaaagagtctccagttctgctctggcctactaactgttaccactgagagaacaacatgttcatttgacatgattgaagctggcatccgtatatgaagatccttgtcaagctttcttctgtggtctgattagtgttgataccggggcacctcctctggtacttttaagtgttttgttatttatgtttactttttggaatggtgtaagcctaaccacaaataaaagatctttgcctaaaaaaaaaaaaaaaaaagaaaaaaaaaaaaaaaa

SEQ ID NO: 57593 - DNA, 2970 bp, Homo Sapiens
ctcggagagtaggggggacagcggatcccagcaggttaggccggaggaacagcgccatgtgctccgggctcctggagctcctgctgcccatctggctctcctggaccctggggacccgaggctctgagccccgcagtgtgaacgatcccgggaacatgtcctttgtgaaggagacggtggacaagctgttgaaaggctacgacattcgcctaagacccgacttcgggggtcccccggtctgcgtggggatgaacatcgacatcgccagcatcgacatggtttccgaagtcaacatggattataccttaaccatgtattttcaacaatattggagagataaaaggctcgcctattctgggatccctctcaacctcacgcttgacaatcgagtggctgaccagctatgggtgcccgacacatatttcttaaatgacaaaaagtcatttgtgcatggagtgacagtgaaaaaccgcatgatccgtcttcaccctgatgggacagtgctgtatgggctcagaatcaccacgacagcagcatgcatgatggacctcaggagataccccctggacgagcagaactgcactctggaaattgaaagctatggctacaccacggatgacattgagttttactggcgaggcggggacaaggctgttaccggagtggaaaggattgagctcccgcagttctccatcgtggagcaccgtctggtctcgaggaatgttgtcttcgccacaggtgcctatcctcgactgtcactgagctttcggttgaagaggaacattggatacttcattcttcagacttatatgccctctatactgataacgattctgtcgtgggtgtccttctggatcaattatgatgcatctgctgctagagttgccctcgggatcacaactgtgctgacaatgacaaccatcaacacccaccttcgggagaccttgcccaaaatcccctatgtcaaagccattgacatgtaccttatgggctgcttcgtctttgtgttcctggcccttctggagtatgcctttgtcaactacattttctttggaagaggccctcaaaggcagaagaagcttgcagaaaagacagccaaggcaaagaatgaccgttcaaagagcgaaagcaaccgggtggatgctcatggaaatattctgttgacatcgctggaagttcacaatgaaatgaatgaggtctcaggcggcattggcgataccaggaattcagcaatatcctttgacaactcaggaatccagtacaggaaacagagcatgcctcgagaagggcatgggcgattcctgggggacagaagcctcccgcacaagaagacccatctacggaggaggtcttcacagctcaaaattaaaatacctgatctaaccgatgtgaatgccatagacagatggtccaggatcgtgtttccattcactttttctcttttcaacttagtttactggctgtactatgttaactgagtgactgtacttgatttttcaaagacttcatttaacactgagtgaaatattactctgcctgtcaagtttttatacctgtacacacacagacacacaagcagacacacacatatatacatacgcaattgtatatatatgtgaactttctcagcatatatataaaatacacgtgtatatgaggatgtatgtgtatatgtttatacacacaggagtcagtgcccatgtgtatggaagacaaatacacatacatatatacattttgcagctatggacaatttaccacaggatgcatattaaagaaagtcatagtttttttcttttttaattgaaagggacaagtatcatctaaatattatgccttgagaatgagggcgtgaaacacaatatcatccccaaatgtgtcttgtattatcataagttagatgttttagtttaaaaatcagaaagacattcttagttaatctttgaaaactcatacagtggtattgctagtttaaaatgagtcacttacttcatatcctctcgttcagtttagtaagcaaaggcttcttggcttctctggtgatggggtttgttttcatcgggcatacgttttctgcaatggtttagtggctggggtgagccactggcagtgtgcttacctgttgtctgaaacatagatagatcccacgttgatgtctgaacgaccgtcttttgaaaactcatcgggagtgaatggcatctcgttgtaagtactctaatatacagtgtgtagtttgtttctgttgttcacttggagtggatccagcttcactgtcatgtgcgaacacagtgacacgtttggccagtgacatttcaatcactgaaaatgtgctctacatctcgtatggatttctaggcctgatatccaacagaaagcatagacgtctcaggttattcgttactctaaggtaaaaccatctaggatgattttcccccttgcagttatgttatcattcttataacattgtatgttaatagaaaatatatttgcataatatgcatatatatgtatatttaccaagattttgtttcttacgcttgctatcatggcagcatgcgatgtcatattttcctttatgtgatgtaactactttctgttatctagaaattaagattgaagctaaaacacttctactgttcaatttcagaaactaagaatcatcctcatgcctttatttctgtatctgacatatttcataagcacatccaactactcctagactgactaggattctgcaggaacatgacccgtacacaccacgcgtcacccaacgacccatgaccgttctctgaggcaaaggagggcaacctgacagcaaacacagtcactgttggttccttctgatccacagcctcatcagtatttggactttttaaagctcgtagaaacaagacaaggtgcaccggtttcatagacgcaaccttaacttactatttagatgagatctttctaaagaaaaaaaaaaaaaaa

SEQ ID NO: 57594 - DNA, 5879 bp, Homo Sapiens; identical to SEQ ID NO: 30779

SEQ ID NO: 57595 - DNA, 5604 bp, Homo Sapiens; identical to SEQ ID NO: 24820

SEQ ID NO: 57596 - DNA, 4364 bp, Homo Sapiens
atgatgttacgccagcttctggcagttgctgccatgaccatggagtggcagcagcagcagcaccccgggggcgcgggcgacgccagcccgggacccggcaagggaaagggcaagcgcgcggcggagctggccccgcgcgacaaggcgccggcggctgcggcggcggcggcggcggctgcggcgggggccgggggcccccgcgagagggcagcgggcgccagggcggggccgggcccggcggtggcggcggcggcgggcggcagcctggtccccgcggcgcgccagcaacactgcacgcaggtgcgcagccggcggctcatgaaggagctgcaggacatcgcgcgccttagcgaccgcttcatctccgtggagctggtggacgagagcctgttcgactggaacgtgaagctgcaccaggtggacaaggactcggtgctgtggcaggacatgaaggagaccaacaccgagttcatcctgctcaacctcaccttccccgacaacttccccttctcgccgcccttcatgcgggtgctcagcccgcgcctggagaacggctacgtgctggacggcggcgccatctgcatggagctgctcacgccgcgcggctggtccagcgcctacaccgtggaggccgtcatgcgccagttcgcagccagcctggtcaagggccagggacggatctgtagaaaagctggcaaatcaaaaaagtccttcagtcgcaaggaagctgaagctacctttaagagtttggtgaagacgcatgaaaaatatggttgggtcaccccgcccgtgtccgacggctgatgtctgccacgtgcagtagacgctcgagcgcctgtccacacacacaccagtaccctgacatctcctcaatgctgtgcatcctccacccgtttttactccagccagaactgcatcctgaatgcccaggagacgtttaagttatttatgaaaagatgtgtgtacagagaggaagagggagcaaatgccgttcggattatgtttcgattataaatgaatgatcacctcgaagtcactttagaacacatgttgagatggtgacatttcccagcctgcctgcccctctgcccaccccggtcacattgccctgagcttctttccatgacagcagctccgacgagccggcaggaaactcaatgcccctgctggctccatttccatgtaaatggcgccgttcatatttcacagggacgccgtgcatctccgccgtgcgtccccggcacgtgtttgctgtgctctgtatctctgtttttcttcctggaaggtcaacataacttgaaaatgtgtctttctgtggcccatggtccgctgtgatgacatttagacctcatttgtgctatgacctttggctcatgaaaacacaaatttaacattgccaggttctagtgatttaaaaccacaactgcccacttggtgaaaacgtgctctcgatgctgatttgtggtgtgctgctgtccacagataaaccagtgccattagatggaaggcagaggatactgcgaccacccctggcagacggtggcgtagacaccaggtgcgccctctggggctcagagcaacggatggtcagctgcgaacagtctcgtccgatgttaggaaatggtcctacggccgcgcctttgtgttcctgtcttctctccaccaccaaaagcaaaagatgatttcccattcactgcagtcatctgactcattttaatatctgtgctagtgacaatgaatgtcagaactgccaaaggataccaagtgatcatacgatgatttgcatgatcgggtctatttcacccaatagtcacttgtgtgtcccccgaaattgggatgggtgagcacccttgctgtggtgtaaacttcctgttatttaatctcccccacggtttcatttttctcttctgttaatacttagaactttctaagaaactccatgaaatgaggaaatactgtttctaataatatgaggaaagaagtaaaaatgttcattccaagtggcaagtcttattggacacattttaaataaaatcatgcatacctgatacactgcctcaaggatccagtcattgtgggctatccttccatttaaaatatttcagatattcttaaattttttaaatattgcaaatactacaacatgtaattccagagcagcgttctaagtcaggtaccagaaatgagtcttaggaacccatagtctttgcaaaaattcagtagattgaaatagtccccagaagcagccaaggagctgaagggatgattcgatcaagttcagatgttgccaattgtatcttactgctgtgaaggaggaaaagtcttccgggataatgtattcaattcttcaggcagttttgtctacttggggacctgcccattggttcaaggttttcagagatccaagaggccttgcctcaaagaacaaggattggcgcctttcagcagggctgcccattcaccaaacttattgttacttttgtttttctttaccactttcttatttgcccccaagtgcacacaggcagctctgccagaccaaaatgacagtgtattaagaatgcagggcctgctcagcttccctgtgagtcataatagtcgtgaaacttgatgacagtgaacttacgatgttcattcatccaaccctctatggtggcattctccatcctggaaacctgacatttggctgacggtctttggaccctggagctagtggtcatcatggaattacactgtggagatgaaagacctaggacagaaacatcttgctagggaaagcacctgagtttattcctttctaaatattttcctcttctaatgaaaactaaaagcagctttactttagggggaaaaatatatccaaaggcaggtcatttcagtagtgtttattagctgattgaaaaacaggttcacggtgctctctgagaactgcaccaaggggtgcagccaagagactggtctgaccccgggttgggctgggtggcagccggcgacagagcagagagacactcagctcagtgtcgctccttccatacactcagagtttgatttttcttgcatggcatttccattaggtttgttagaaacttatagaagaaatcaattctttagtgaacgaaataccatttttcactcaattggtaagaatttttcattttaaaagcagtaggaagtgatgtaaaactctaccattgcttggactgttaggagtgcggactccctttctggtagactcccttcgtaggcaagcacggtggtgcccagccatggaggcacccttaggacactgagcacaggcctggctgcctgtgccttggccacagcctccttccaccccactgaagtggacacctgcctctggagcccagggtgagaaggagaggcctgaagcctggggccacgttcccacacaagccaaggaacctattcctctttggacagacagcgagggaataatcagacagtgggtgcaaatgttcatgtcccgatagctccacacacccatgtatctgtgggaactcaaaccaagccagagcccacagagccaaacaaacagaaaatcacaaacccatctgtcctcttctcaatgcagaactccttcccgtccaataattttcctgaaccaatcacccttgttattgggtatcttctccactgctgggtaaggcctgcacatggtctgtctgtaactttctagaagactgagaactgcttatgccttagggagttctatgtgagcagcaaggttattccccctagttacacacacacgcacatgtgccaatactcctgcaaagacttgctgtttctaaaatccactactcagaaaaaccagggtgtcggcttaaagttttcagctccatctatcaaaatttgacctttttttaagagaaaaatatgtagatgagtgaaaaagacctaggattgaaagacaaaaagccatgtgtccatgtaaccctggccagtcactccacctgcctgagccttggtttcctcagctgtgagctcctaccaggtcagtgtgggaattggccaaaatgacgcagcagaagtgctttggagactaaagattgtcaacgaaatgtaagtgtcattttcgtagtattaggacgtttacattacagcaggctttaattagaacccacttagatatcgactcagaatgatcaattacagtggttaaaatacacatacctggtaatcatatacttgctttctgtccccagttcttacattaagtcaaccaactgacccaaaaatcaaccaataactaactggccatctctccactcactcagcattctcctcttaaatgcagggcatgcagaagattaaggtacagccccttccctggataggaactc

SEQ ID NO: 57597 - DNA, 3591 bp, Homo Sapiens
ggcttccggtccgcgagccctgagagctaacttggggtcttttcccaaggtggatgtagaagcgggctccggcgtcccactctcccttccatatgggcttagcgtctgggtcactgagaacgacgtctgaatagggccctgggtccttgccatggatgaatgtggttcccgcatccgccggcgggtgtctctccccaaaaggaaccgtccaagcttggggtgtatttttggcgctcccaccgcggccgagctcgagcccggagatgaggggaaagaggaggaggaaatggtggctgagaacaggaggcggaaaaccgcgggcgtactgccggttgaggtacagccccttctactctcagattccccggaatgtctcgtccttggaggtggtgatacaaacccggacctcctacgtcacatgcccactgacagaggggtgggagaccagcctaatgacagtgaagtggacatgtttggtgactatgatagctttactgaaaactcctttatagctcaagttgacgacctggaacaaaaatatatgcaactccctgaacataagaaacatgctacagactttgccactgaaaatctttgctcggaaagtatcaaaaacaaactcagcattactaccataggcaaccttactgaattacaaactgataagcacacagagaaccagagtggatatgaaggtgtcactattgaacctggagctgatcttttgtatgatgtaccttcctcacaggctatatactttgaaaatttgcagaactcttcaaatgatttgggtgatcattctatgaaagaaagggattggaagtcatcctctcacaacactgtgaatgaggaactgccccataattgcatagagcaaccccagcaaaatgatgagtcctcttccaaagtcagaactagttcagatatgaacaggagaaaaagtattaaagatcatctaaaaaatgccatgactggaaatgcgaaggcccagacaccaatattttctagaagtaaacagctcaaagacactctcctatctgaggaaattaatgttgctaagaaaacaattgagtcatcatcaaatgaccttggtcctttttattcattacccagcaaagtgagagacctttatgcccaattcaagggaattgaaaaattatatgaatggcaacatacttgtttaacactgaattctgtgcaagaaagaaaaaatttaatatattccttgccaacaagtggtggaaaaaccctcgtggctgagattttaatgctgcaagaactgctttgctgtcggaaagatgttttaatgattcttccatatgtggcaattgtccaagaaaagatttcaggtttgtcaagttttggtatagaactcggtttctttgttgaagaatatgctggaagcaaaggaagatttcctccaactaaaagaagggaaaagaaatcactctatattgccactattgaaaaaggacatagcttggtgaactccttgattgaaactggaagaattgacagtctgggtctggttgttgtagacgagttgcacatgattggtgaaggaagccgtggagctacactggaaatgaccctagcaaaaatcctctacactagcaaaacgactcaaattatcggtatgagtgcaacattaaacaatgttgaagacctacaaaagtttcttcaagcagaatattataccagtcaatttagaccagttgagttaaaagaatatctgaaaataaatgatacaatatatgaagttgacagcaaagctgagaatggcatgactttttcacgtcttcttaattataagtattctgataccctaaaaaagatggatcctgatcacttggtagcattggtgacagaagttattcccaattattcctgcttagttttttgtcctagtaagaagaactgtgaaaatgtagcagaaatgatatgcaaatttttaagcaaggaatatctgaaacataaggagaaagaaaaatgtgaggtgattaagaacttgaagaatattggcaatggcaacctgtgtcctgttttaaagcgcactatcccatttggagttgcctatcaccacagtggcttaacaagtgatgaaaggaaactcttggaggaggcctactccacaggagtgctctgtctttttacctgcacatctaccctagcggcaggtgtcaacctaccagctcgaagagttattttaagagctccctatgttgctaaggaatttttaaagaggaatcaatataaacagatgattggcagagctggtcgtgctggaatagatactattggggagagtatcctcatattgcaagaaaaagacaaacaacaggtattggagttaataactaaaccattggaaaactgttacagccatcttgttcaggaattcaccaagggaatccaaacattatttctctctttgattggtttgaagattgcaacgaatcttgatgacatctatcatttcatgaatggtacattttttggtgttcagcaaaaggttttattgaaagaaaaaagtctctgggaaataactgttgaatcacttagatacctgacagaaaaaggactcctacaaaaagacactatttataagtctgaagaagaggtccaatataattttcatattacaaagttgggacgtgcttcatttaagggaactatagatttagcttattgtgacattctgtacagagacttgaagaaaggtcttgaaggacttgtgcttgaaagccttcttcatctaatctacctaacaaccccctatgatctggtttcacagtgtaaccctgattggatgatatacttcaggcagtttagccaactcagtccagcagaacaaaatgtagctgccattcttggagtctctgaaagctttattgggaagaaagcatcaggccaagccatcggaaagaaggtggacaagaacgttgtcaacaggctatatctgtcttttgttctttataccttgctcaaagagaccaacatttggactgtatctgaaaaatttaatatgcctcgaggatatatacaaaatcttctcactggaactgcctcattctcatcttgtgtgttacatttctgtgaggagcttgaggagttttgggtttacagagcccttttggtagaacttaccaagaagctgacttactgtgtaaaggcagaattaatccctctcatggaagttactggagttttagagggtcgagcaaaacagttatacagtgcaggttacaaaagtctaatgcacttagctaatgcaaatcctgaagtgctcgtaaggacaattgatcatttatcaagacgccaagccaagcaaattgtttcatcagcaaagatgctgttgcatgaaaaagcagaagccctgcaagaagaggtagaagagttactaagattgccttctgatttccctggtgctgtggcttcttccactgacaaagcatgaagctatctgatgagaattttcatatatgaattatttattgtacatgtgtgttattaaagataacttatactttataaatgaaaaaatacatttcagttatacagcaaaaaaaaaaaaaaaaaaaaaaaaaaaaa

SEQ ID NO: 57598 - DNA, 6344 bp, Homo Sapiens; identical to SEQ ID NO: 29704

SEQ ID NO: 57599 - DNA, 3098 bp, Homo Sapiens
cgggaggttcggagcgggagctcgggctcgcggacggtatggaggactacgagcaggagctgtgcggcgtcgaggatgatttccacaaccagttcgcggccgagctggaggtgctggcagagctggaaggggcgtcgactccgtcgccctccggggtccccctgttcaccgcgggccgacccccgcggacgttcgaggaggcccttgccagaggggacgcggcctccagtcccgccccagccgcatctgtgggcagcagccagggcggcgccaggaagaggcaggtggacgccgacctgcagccggccgggtccctgccccacgcccccaggatcaaacggcctaggctgcaggtggtcaagaggctgaacttcaggtcggaggagatggaggagccgccccctcccgactcctcgccgacggacatcaccccgccgccgagccctgaggacctcgcagagctttggggccacggagtctcagaagctgctgccgacgtgggtctcacacgggcctcaccagctgcccgcaatcccgtcctgaggcggccccccatcttggaggactacgtccacgtgacatccacggagggcgtccgggcttatctggtgctgcgtgctgaccccatggccccgggggtgcagggctctctcctccacgtcccatggcgaggcggtggccagctggacctgctgggtgtgtccttagcctccctgaagaagcaggtcgacggcgagcggcgggagcggctgcttcaggaggcccagaagctttcagacaccctgcacagtctcaggtcgggggaggaggaggcagcccagcccttgggggcccctgaggaggagccgactgacggtcaagacgcctccagtcactgcctctgggtggatgagtttgcaccccgccactacacggagctgctcagtgatgacttcaccaaccgctgcctgctcaagtggctgaagttgtgggacctggtggtgtttggccacgagaggccttcccggaagcccaggcccagtgttgagccggcccgggtcagcaaggaggccacagccccaggcaagtggaagagccacgaacaggtgctggaggagatgctggaggctgggctggacccgagccagcgaccgaagcagaaggtggcactgctctgtgggcccccggggctggggaagaccaccctggcacacgtgattgcgcgtcacgcggggtactctgtggtggagatgaacgccagtgacgaccgtagcccggaggtcttccgcacacgcatcgaggcggccacccagatggagtcggtgctgggtgctggcgggaagcccaactgcctggtcatcgatgagatcgacggggcccccgtggccgccatcaacgtcctcctgagcatcctgaaccgcaaggggccacaggaggtggggccacagggcccggctgtgccttcgggaggcggccgacggcgccgggcagagggggggctcctcatgaggcccattatctgcatttgcaatgaccagttcgcaccgtccctgcggcagctgaagcagcaggccttcctgctccacttcccgccgactctgccctcgaggctggtgcagcggctccaggaggtctccctgcggcagggcatgagggccgacccaggggtgctggccgccctctgtgagaaaactgacaatgacatccgggcctgcatcaacaccctgcagttcctgtacagccggggccagcgggagctgagcgtgcgggacgtgcaggccacacgcgtgggcctcaaggaccagcgcagagggctcttctcggtgtggcaggaggtcttccagctgcctcgagcccagaggcgccgtgtgggccaggaccccgccctgcctgctgacacactcctgctgggtgacggggacgcgggctccctcacctccgcctcacagcgattctaccgtgtcctgcatgccgctgcctctgcgggcgagcacgagaaggtggtccagggcttgtttgacaacttcctgcgtctgcggctgcgagactccagcctgggtgctgtgtgtgtggccctcgactggctggccttcgatgacctgctggcgggggctgctcatcacagccagagcttccagctgctgcgctacccacccttcctgcccgtggccttccatgtgctgtttgcttccagccacacacccaggatcaccttccccagcagccagcaggaggcccagaaccggatgagccagatgaggaacctgatccagacgctggtgtccggcatcgcgccagccacgcgcagccgggccacgccccaggccctgctcctcgatgccctctgcctgctcctggacattcttgcacccaagctccgccccgtgagcacacagctgtacagcacccgtgaaaagcaacagctggccagcctggtgggcacgatgctcgcttacagcctgacctaccgccaggagcgcacgcccgatggccagtacatctacaggctggagccgaacgtggaggaactctgccgcttccctgagctgcctgcccgcaagcccctcacctaccagacgaagcagctcatcgcccgcgagatcgaggtggagaagatgcggcgggcggaggcttctgcccgggtagagaacagcccccaggtggatgggagccccccagggctcgagggtctgctggggggcattggggagaaaggggtgcaccgacctgccccacgcaaccatgagcagcggctggagcacatcatgaggcgagcggcccgggaggaacagcctgagaaggacttctttggacgtgtggtcgtcaggagcacagcagtcccgagtgcaggggacacggccccggagcaggactcagtggagcggcgcatgggcacagcggtgggcaggagcgaggtctggttccgcttcaacgagggtgtttccaacgccgtgcggcgcagcctgtacatcagggacttgctttagttttttgagccgcggacatgccctcgcattgcttcccgcagagtgcagagacaggaagctggagatgtctttataaagtcacacctttacaggctgtaaaaaaaaaaaaaaaaaaaaaaaaaaaaaaaaaaa

SEQ ID NO: 57600 - DNA, 2024 bp, Homo Sapiens; identical to SEQ ID NO: 25759

SEQ ID NO: 57601 - DNA, 2756 bp, Homo Sapiens
atgcagttaggggagcagctcttggtgagctcagtgaacctgcctggcgcgcacttctacccgctggagagtgcgcgaggcggcagcggcgggagcgctggccacctccccagcgcggccccctctcctcagaagttggacttagacaaagcgtccaagaagttttccggcagtctctcctgcgaggcggtgagcggggagcccgcagccgccagcgcaggggcccccgcggccatgcttagtgacaccgacgccggggacgcatttgccagcgctgcggcagtggccaagccggggcccccggacggccgcaagggctccccctgcggggaggaggagctgccctccgccgctgcagccgccgccgccgccgccgccgcggctgcggccactgcgcgctactccatggacagcctgagctccgagcggtactacctccagtcccccggtcctcaggggtcggagctggctgcgccctgctcactcttcccgtaccaggcggcggctggggcgccccacggacctgtgtacccggctcctaacggggcgcgctacccctacggctccatgctgccccccggcggcttccccgcggctgtgtgcccacccgggagggcgcagttcggcccaggagccggtgcgggcagtggcgcgggcggtagcagcggcgggggcggcggcccgggcacctatcagtacagccagggggctccgctctacgggccgtaccctggagccgcagcggcgggatcttgcggaggactggggggcctgggggttccaggttctggcttccgtgcccacgtctacctgtgcaaccggcctctgtggctcaaattccaccgccaccaaactgagatgatcattacgaaacagggcaggcgcatgtttcctttcttgagcttcaacataaacggactcaatcccactgcccactacaatgtgttcgtagaggtggtgctggcggaccccaaccactggcgcttccaggggggcaaatgggtgacctgtggcaaagccgacaataacatgcagggcaacaaaatgtatgttcacccagagtctcctaatactggttcccactggatgagacaggagatttcattcgggaaattaaaactcaccaataacaaaggcgcaaataacaacaacacccagatgatagtcttacaatccttacacaaataccaaccccgactgcatattgttgaagttacagaggatggcgtggaggacttgaatgagccctcaaagacccagacttttaccttctcagaaacgcaattcattgcagtgactgcctaccaaaacaccgatattactcaactaaagattgatcataacccctttgcaaaaggcttcagagacaactatgattcatcccatcagattgtccctggaggtcggtacggcgttcaatccttcttcccggagccctttgtcaacactttacctcaagcccgctattataatggcgagagaaccgtgccacagaccaacggcctcctttcaccccaacagagcgaagaggtggccaaccctccccagcggtggcttgtcacgcctgtccagcaacctgggaccaacaaactagacatcagttcctatgaatctgaatatacttctagcacattgctcccatatggcattaaatccttgccccttcagacatcccatgccctggggtattacccagacccaacctttcctgcaatggcagggtggggaggtcgaggttcttaccagaggaagatggcagctggactaccatggacctccagaacaagccccactgtgttctctgaagatcagctctccaaggagaaagtgaaagaggaaattggctcttcttggatagagacacccccttccatcaaatctctagattccaatgattcaggagtatacaccagtgcttgtaagcgaaggcggctgtctcctagcaactccagtaatgaaaattcaccctccataaagtgtgaggacattaatgctgaagagtatagtaaagacacctcaaaaggcatgggagggtattatgctttttacacaactccctaaagagttattttaacctcaaaaattagctaactttttgcagatggacttggtggtgttttttgttgtcttctttgcctaggttgccaaaaagatgtttgccttccaccttgatgcatcctgttttgtgcaattctctaaaagaaggtgccaaagctttttgattgctgcaggtaactgaaacaaacctagcatttttaaaaaataagattaatggaagactttaaggtattttaaaattcgaagggtatccaaggttctgtatttatttattggggagacactaacccttcaaagaagcaggctgtgaacattgggtgcccagtgctatcagatgagttaaaacctttgattctcatttctatttgtaaattcttaagcaaatagaagccgagtgttaaggtgttttgcttctgaaagagggctgtgccttccgtttcagaaggagacattttgctgttacattctgccaggggcaaaagatactaggcccaggagtcaagaaaagcttttgtgaaagtgatagtttcacctgactttgattccttaacccccggcttttggaacaagccatgtttgccctagtccaggattgcctcacttgagacttgctaggcctctgctgtgtgctggggtggccagtgggactcaggagagagcaagctaaggagtcaccaaaaaaaaaaaaaaaaaaaaaa

SEQ ID NO: 57602 - DNA, 2040 bp, Homo Sapiens
ggaaaacgagtcaggggtcggaataaattttagtatattttgtgggcaattcccagaaattaatggctatgagttcttttttgatcaactcaaactatgtcgaccccaagttccctccatgcgaggaatattcacagagcgattacctacccagcgaccactcgcccgggtactacgccggcggccagaggcgagagagcagcttccagccggaggcgggcttcgggcggcgcgcggcgtgcaccgtgcagcgctacgcggcctgccgggaccctgggcccccgccgcctccgccaccacccccgccgcccccgccaccgcccggtctgtcccctcgggctcctgcgccgccacccgccggggccctcctcccggagcccggccagcgctgcgaggcggtcagcagcagccccccgccgcctccctgcgcccagaaccccctgcaccccagcccgtcccactccgcgtgcaaagagcccgtcgtctacccctggatgcgcaaagttcacgtgagcacggtaaaccccaattacgccggcggggagcccaagcgctctcggaccgcctacacgcgccagcaggtcttggagctggagaaggaatttcactacaaccgctacctgacacggcgccggagggtggagatcgcccacgcgctctgcctctccgagcgccagatcaagatctggttccagaaccggcgcatgaagtggaaaaaagaccacaagttgcccaacaccaagatccgctcgggtggtgcggcaggctcagccggagggccccctggccggcccaatggaggcccccgcgcgctctagtgcccccgcacgcgggagccacgaacctcggggtgggggtgggcagtgagtgcaggggatggggtggggggacaggagggggccctggggcctgggccccggaaaaatctatctgccctcccccacactttatatacgaataaacgcagaagagggggaggggaagctttatttatagaaatgacaatagagggccacggggaggcccccccagaagcaagattcaaatctcttgctttctttcttaaaaaaaagaaaaagaaaaagcaagaagaaggaagaaagaaaaagacagaaagagaaataggaggaggctgcagctcctcgttttcagctttggcgaagatggatccacgtttcatctttaatcacgccaggtccaggcccatctgtcttgtttcctctgccgaggagaagacgggcctcggtggcgaccattacctcgacacccgctaacaaatgaggcccggctcggccgcctccgcctctgctactgccgctgctggaagacagcctggatttcctttctttgtcccccactcccgatacccagcgaaagcaccctctgactgccagatagtgcagtgttttggtcacggtaacacacacacactctccctcatctttcgtgcccattcactgagggccagaatgactgctcacccacttccaccgtggggttgggggtgggcaacagaggaggggagcaagtagggaagggggtggccttgacaactcaggagtgagcagggaaattgagtccaaggaaaaagagagactcagagacccgggagggccttcctctgaaaggccaagccaagccatgcttggcagggtgaggggccagttgagttctgggagctgggcactactctgccagtccagagttgtacagcagaagcctctctcctagactgaaaatgaatgtgaaactaggaaataaaatgtgcccctcccagtctgggaggaggatgttgcagagccctctcccatagtttattatgttgcatcgtttattattattattgataatattattattactatttttttgtgtcatgtgagtcctctctccttttctctttctgacattccaaaaccaggccccttcctacctctggggctgcttgagtctagaacccttcgtatgtgtgaatatctgtgtgctgtacagagtgacaatagaaataaatgtttggtttcttgtgaaaaaaaaaaaaaa

SEQ ID NO: 57603 - DNA, 1973 bp, Homo Sapiens
ggcagtcgcaacccatactattcggacagatggcacagaaaccgctgcgcctcttggcttgtggagatgttgaaggaaagtttgatattttattcaatagagttcaagcaattcagaagaaaagtggaaactttgatctgctgttgtgtgtaggaaatttctttggctccacccaagatgctgaatgggaggagtataagactggcatcaagaaagttcctattcagacatatgtgcttggtgctaataaccaggaaacagtaaaatatttccaggatgctgatggatgtgaattagctgaaaacattacttatctgggtcgtaaaggtatcttcactggaagctcggggctgcagattgtgtacctcagtgggacagaatccttaaatgagccagtaccaggttatagttttagtcccaaggatgtgtcttctctgagaatgatgctgtgtacaacctcccagtttaagggtgttgatatcttgctcacatccccatggcccaagtgtgtggggaactttgggaattcttctggagaagtggataccaaaaaatgtggttctgctttggtttccagtcttgccacgggcttgaaaccaagataccattttgctgctttggaaaagacctattatgagaggcttccatatcgaaaccatatcattctacaggaaaatgcacagcatgccacccggtttatagctctggcaaatgttggaaatccagaaaagaaaaagtatctttacgcgttcagtattgttcccatgaagctaatggatgcagcagaactggtaaaacagcctccggatgtcactgaaaacccttacagaaaatctgggcaggaagcatccataggaaagcaaattcttgcccctgtggaagaatcagcctgtcagtttttctttgatttaaatgaaaagcagggaaggaagcgttcatccacaggtagagatagcaaatcttctcctcatccaaagcagcctcgcaaacctcctcagcctccaggaccctgctggttttgccttgctagccctgaagtggaaaaacatttggtggtcaacatcggcacacattgctaccttgccctggccaaaggaggcttatctgatgaccatgtcctcatcctgcctattggacactaccagtcagtggtggagctttcagcagaggtggtagaagaggtggagaagtataaggccactctgagacggttctttaagagtcgagggaaatggtgtgttgtatttgagagaaattataagagccatcacctccagctacaggtcattcctgtcccaatcagctgctctactactgatgacattaaagatgccttcattacccaggcacaggagcagcagatagagctgttggaaatcccagagcactctgacatcaagcagattgcacagccaggagcagcatatttttatgttgaacttgacacaggagaaaagcttttccacagaattaaaaagaattttcctttgcagtttggaagggaggtcctggccagtgaagccatccttaatgttcctgataagtctgactggaggcagtgtcagatcagcaaggaagacgaggagaccctggctcgccgcttccggaaagactttgagccctatgactttactctggatgactaaaacaaagggaagaactttttatgaactccacaggaagtagtaaagctttttttttttttttaattaaaagaattttttttgagacaaagtctcgctctgtcacccaagcaggattgcagtgagccaagatcgctccattgcactccagcctgggtgacagtgaaactccatctcaaaaataaaagaataaaagtatgtctgtcatccagctcctatgtctgttatccagctccaagtacagcttgtgtatatcaacattttcaaaaacctttaaactaccaaatgaaatccagatgtttttccatggaaaaaaaaaaaaaaaaaaaa

SEQ ID NO: 57604 - DNA, 1331 bp, Homo Sapiens
cggaagcaggaagtgagtttgcgaacggagcagctgctgcagcagggcccatggcggacacccagtacatcctgcccaatgacatcggcgtgtctagcctggactgccgtgaggccttccgcctgctgtcacccacagagcgcctctatgcctaccacctgtcccgtgccgcctggtacggaggcctggctgtgctgcttcagacctcccctgaggccccctacatctatgctctgctcagccgcctcttccgcgcccaggaccccgaccagctgcgccaacatgccctggctgaaggccttaccgaggaggagtatcaggcgttcctggtctatgccgcgggtgtttactccaacatgggcaactacaagtcctttggtgacaccaagtttgttcccaacttgcccaaggaaaagctggaacgggtgatcctagggagtgaggctgctcagcagcacccagaagaagtcaggggcctctggcagacctgcggggagcttatgttctctctggagccaaggcttcgacacctcggactggggaaggagggaatcaccacctatttctctgggaattgtaccatggaagatgcccgggtccgcctcgaccgcagcaagatccggtctgtgggcaagcctgctctagagcgcttcctgcggagacttcaggtgctgaagtccacaggggatgtggccggagggcgggccctgtacgaggggtatgcaacagtcactgatgcgccccccgagtgcttcctcaccctcagggacacggtgctgctgcgtaaggaatctcggaagctcattgttcagcccaacactcgccttgaaggctcagacgtgcagcttctggaatacgaggcgtcagctgctggcctcatccgatccttctctgagcgtttcccagaggatggacccgagttggaggagatcctcacacagctggccacagccgatgcccgattctggaagggccccagtgaggccccatctggccaagcttgaggaagatgtgtggccttgcccccaattccatcagaccaaggctgcaagtggccctccattcgtcactttccagcctgccaattgcttcccctctgtgatctcatttcatctgcactgccatacgtggagtgagcaagacagggcttaccatcctgtctaccagatgaggaaatggcagttctgagaagtcactggtctagatcccgcaggtggcacgtgacagctagggttcaaaacgttctcaccaaatccaatgctcctcacatattaattttataaccagacaaataaatattagagacaaccaaaaaaaaaaaaaaaaaaaaa

SEQ ID NO: 57605 - DNA, 3138 bp, Homo Sapiens; identical to SEQ ID NO: 23616

SEQ ID NO: 57606 - DNA, 3672 bp, Homo Sapiens
ctggtcgcgcccagctgcgtcaccccaggaactggggtctgtgggccagtgtggccgtccctacgaagactggcacgacccctaaagttaggtcggaagatctgtgggcagcttgagcgccgaggagtgccctgaacgctcaactcgccctggaaacgtttttccgtacagcaacatggcggcgcccatagactcttagaaaaggagaaagctttttttctgtggactgaaaggggcgtttttcatgatcactatttagatgggtgctgttttcctgaggagagtctgggaaggcggcgtccgcttttctgacaagggaagaggctactttgtccttttaaggattcaatgacttcctgacttggaggatgtggacctagtggctagacccaaggaccaaagcaagaagtcgtggggggcccaggaagacaggaggatcacattgggattccagacataagatcaggttttaaccccctttggccaaattttggctgaaaatgttgaattatcaactctgaaattaaaaagaaagtttatattaaaacattgcaattttccttagaatttctgtatatattaacatcatgaatgataaattctcttcaatgtgcatgtcaggtttttgtacttgtatatcaaatctatctgtgtgtatgaagtgtatgtttattgaaatacaagatatttaagaagctgatctggaaagttggattttcattctagttcctaattcccagaggcttttttaaaggaagggaatgtctgtggtacaccagttgtcagctgggtggttactggatcatctttcttttatcaacaagataaactatcaacttcaccagcatcatgaaccttgttgccgtaaaaaggagttcactacttctgttcactttgagtctcttcaaatggattctgtgtcctcctctggagtctgtgctgcatttattgcttctgactcttccactaagccagagaatgatgatggaggaaattatgaaatgttcacacgaaaatttgtttttcgacctgaactgtttgatgtcaccaaaccttatataactccagctgttcataaagaatgccagcaaagtaatgaaaaggaagatctgatgaatggtgttaaaaaagaaatctccatttctattattgggaagaagcgtaaaagatgtgttgttttcaatcaaggtgaattggatgctatggaataccatacaaagatcagggagctgattttggatggatctttacagttgatccaggaaggtctcaaaagtggttttctttatccactttttgaaaaacaggacaagggtagtaagcccattactttaccacttgacgcctgcagtttgtcagaattatgtgaaatggcaaagcatttgccttctctgaatgaaatggaacatcagacattacaattggtggaagaggatacatctgttacagaacaggatttatttttgcgagttgttgaaaacaactctagctttacaaaagtgattactttaatgggacagaaatacctgctaccaccgaaaagcagttttcttttatctgacatttcttgtatgcaaccacttctaaactataggaaaacatttgatgtaattgtgatagatccaccatggcagaacaaatcagttaaaagaagtaataggtacagttatttgtcacccctgcaaatacagcaaatacctatccctaaattggctgctccaaactgtcttcttgttacttgggtgaccaatagacagaagcacctacgttttataaaggaagaactttatccctcttggtctgtggaggtagttgctgagtggcactgggtaaaaataaccaattcaggagaatttgtgttcccattagattctccacacaaaaagccctacgaaggtcttatactggggagggttcaagaaaaaactgctctaccattgaggaatgcagatgtaaacgtgctccccattccagaccacaaattaattgtcagcgtgccctgtactcttcactcacataagccaccgcttgctgaggttttaaaagactacatcaagccagatggggaatatttggagttgtttgctcgaaatttacagccaggttggactagttggggcaatgaagttctcaaatttcagcatgtggattattttattgctctggagtctggaagctgactatgatcttgattaaagtagtggtttcttcattgtttcctcaccacttttcccttaattctaagtcatttttttattttgttaccaacccatattcttagaatataaacaggacttgtttttttcagtaagggaccagaagtgactagccttcatgtaattttaagatgaattttacttgagttgcactaacattctatgttattctagactatacaaattaagtggtaagcagttataaagacggcaagaccatgctattgaaaaagttcagaaaacatacaccgtggaccagaggtcttaatcctatctatggatgtgttttgtgtgacccatacagtgttgtaaaaaacacttagaaccattattctaaaaaatggggctatttcacattaaagtccagatttctgcttctttttaaacatcagaggctctggctacacagaggcctttgttctttcctggcatcagtctgcaggaccaagcggtggtggctcacttgggaagagccttgtgctctccactttgccacagtaccactgccaccatgctgctcacttatgtcatccacttggcccttgtatgacctgaatttgcaacctctggtatactgttatgttctggagaaaatattcaaagatctgccaaatactgcattagtatactgagtttatacagcatttttgtagggttttaaattgcattcaaggtcactttccaagcactttctggttttgcttgtttttctagaagaaaatgaaaagctattccttataataaacatggcagcaagtaaacagtgtgattgtgaaaaaaatattatttatagattttctacaaataaatatttgtctaccaagtaaaatattttgactgaaatgattctttgaaatgcatattgatttattatgtattgactttttaaaaattgaggtataattttcacaaaattctccaattttcagtgtcaaattcagtgaattttgaaaacatatatacagttgtctgtctgccacagtgatcatgatacagaacactttctttaccctgaaaacttctcatttttccttttgcagtcaatcccctgctcctatccttggcccctggcaaacactggtttgctttctatcattagttctgctgtttgagaatttcatataaatggaatcatgcaatgtgtaatctattgtgcctggcttctttcacgtagcattttgagaaaagcatttatactatttacagattgttgacaaatatttatccactaagtaaaatgttagactgaaatgattctttgacaagcttgccaatttactgattttgtcaaagaaaaatatgttatttttgaagtttgttcatcctttgagtgtgtgagtatagtatcagaggcttaattttgtatttatggagctattctaacttgttatttaaaaggaaaaaggtattaaacttgaagcaaacttctcatgaaaaaaaaaaaaaaaaaaaaaaa

SEQ ID NO: 57607 - DNA, 945 bp, Homo Sapiens
gcaggtaggtggacggagagatagcagcgacgaggacaggccaaacagtgacagccacgtagaggatctggcagacaaagagacaaggtgagaaggagactttggaagtgacccaccatggggctcagcatctttttgctcctgtgtgttcttgggctcagccaggcagccacaccgaagattttcaatggcactgagtgtgggcgtaactcacagccgtggcaggtggggctgtttgagggcaccagcctgcgctgcgggggtgtccttattgaccacaggtgggtcctcacagcggctcactgcagcggcagcaggtactgggtgcgcctgggggaacacagcctcagccagctcgactggaccgagcagatccggcacagcggcttctctgtgacccatcccggctacctgggagcctcgacgagccacgagcacgacctccggctgctgcggctgcgcctgcccgtccgcgtaaccagcagcgttcaacccctgcccctgcccaatgactgtgcaaccgctggcaccgagtgccacgtctcaggctggggcatcaccaaccacccacggaacccattcccggatctgctccagtgcctcaacctctccatcgtctcccatgccacctgccatggtgtgtatcccgggagaatcacgagcaacatggtgtgtgcaggcggcgtcccggggcaggatgcctgccagggtgattctgggggccccctggtgtgtgggggagtccttcaaggtctggtgtcctgggggtctgtggggccctgtggacaagatggcatccctggagtctacacctatatttgcaactccactcttgttggcctgggaacttcttggaactttaactcctgccagcccttctaagacccacgagcggggtgagagaagtgtgcaatagtctggaataaatataaatgaaggaggggc

SEQ ID NO: 57608 - DNA, 2623 bp, Homo Sapiens
ggcatcttggcggatctgaggcgtttggagggacaacaacctagatgtggagccgaaatttggggtgtgacctatcttatgcggagcggacctttgaggatctctgagtggaaggtgtactacaaattcttgcaatcctcacgctcttcgtctgcggcgacagttcacctggggtgggcctgatttgttcctgactctagcaaacaaaccccgggaccggggagagctgggatgttggagcgccctgaggccaggctacttgggggcaaactgaggaaagagtgttgaggattatttctagagttcaaaggtcagaggtcaatgtagcgaggagttgtgggggagtccaaagtcggaggggtgcttaggggagaattagggagggactgaatactcaagggacagatttgtggataagtagcttggagggaggagaaaccgggagggggcagatggcgtagtgctggggaggcggggacacaggggaagagagagggggaaaggaatcccctgaatattcattcccagacttcaggcctgtcagtcgcagtctcggtcgtacctcccctagttgcaaccttagctgttggcagggtgaagagatggcttccccgtctagacagcccccgccaggggggtcaggactgcttcaagggagccgggctcgttcatatggaagcctggtgcaatcggcctgctccccagtgagggaaagacgcctggagcatcagttggagcccggagacaccctggctggactagcactcaaatatggggtgacgatggaacagattaaacgtgcaaaccgcctttatactaatgactccatcttcctgaagaaaaccctctacatccccatcctgacagagcccagagacctgttcaatggtttggactctgaggaagagaaagatggagaggaaaaagtacacccaagtaacagtgaagtttggccacactcaactgagaggaagaaacaagagacaggagcaggacgtgccaatggtgaagtcctccccacacctggccaggaaacccccacgcccatccatgacctctctgcctctgatttccttaagaagcttgattcacagatcagcctgtccaagaaggctgctgctcagaagctgaaaaaaggggaaaatggggtacctggggaggatgcaggtctccacctgagctccccttggatgcagcaacgagcagtcctaggtcctgtgccgctgacccgtacctctcggacccggacactacgggaccaggaggatgaaatcttcaaactctgatgtccccagaactgactgagagaagcaagatgttgaaagagaaacttcagggggagaggagcctgaggtgaggctcaagaacatggcttatgagcctgcctccctccactccagccatcctccccagcctccttgtctgccaaaaattccttggcctggggcagttttattggcaagattagggaatgggaactggacctttcccagttcttgggctgaatctagagttgagtcctttagactcaaaaggctctttttatatccttgttgcctttcctatcctttttacctttccctggccttagaacagggaagcagagactccccctcagcttcttcctcatctccaactatgtgacataatttatttggtgctaatattgaagtaatatttatttgctatattttatttcttcccactcttagctgaaaaatggaatttctatagccctggggtgaggagaacccgggaacagtgagccagtgactgctggttctccactttccccaccttgttagccaaacatgttattgaggatgaggcaatcggtgatatagcccaccacagagaatggatgactgttggccttttctccaatctcaaagtgacagatttgggctgattctttttttttttttttttttttttttggtaccccattcctgttgaatgggctcagtcttgacaaaccaattccctgtaactttttcacaattcttgactctgagaaaaagcagcactgtagggacctgaactctccattctaccagttcacccttctgacctgttctgctcagcctgtggtgaggggaacagatggaagaaggctttccttggggtttgaagaggaagccagttgtgggagtctctttgttacaccccctcccctccagaccctctctctctatgccttcctcctcactgcatatttatttgcgatttgtagcactgatctatggtacagttgttttgtttcttaaacagaagtaggtaagggaacctcagtaataatggaaatctgcctcagtctcctgtttggaaatgatgagaggtgagataagtaatgtttatatacctcctttcttctgtgatgattataaggtatacgaagctggacagattaaacattgagccctgtgcaaaaaaaaaaaaaaaaaaaaaaaaaaaaaaaaaaaaaaaaaaaaaaaaaaaaaaaaaaaaaaaaaaaaaaaaaaaaaaaaaaaaaaaaaaaaaaaaaaaaaaaaaaaaaaaaaaaaaaaaaaaaaaaaaaaaaaaaaaaaaaaaaaaaaaaaaaaaaaaaaaaaaaaaaaaaaaaaaaaaaaaaaaaaaaaaaaaa

SEQ ID NO: 57609 - DNA, 3692 bp, Homo Sapiens
agacgctctgtactagaaaagaatcttataaaagtaactgttgcaccatttaatccaacagtttgtgatgctctgcttgataaggacgagactgattcgtccaaagatactgaaaaactctcttcccttggagaagagatgagagaagatggtcttagcccaaatgaaagcaaactttgtactgaatctgaagggatcagccccaataactctgcctggaatgggccccagctctcttcttcaaacaataactttcaacagactgtctctgataaaaatatgcctgacagtgagaaccctacgtctgtattctctcggatctcagaccattcagagactcctaatatggagttatcctgcagaaatggtggttcacacaagtcaagttgtgaaatgagatctctggttgtttccacctcatcaaacaaacaggatgttcttaacaaggattctgggaagatgaaaggccatgagagaagactaggcaaagtcattcctgttctacaaactaagaccaggactaatgttccgacgttttcacagtcaaatctagaacagcagaagcagctttatctcaggagtctcattgctcatatagaagacccagaggacactaaccaaggatgaatccctagaagtggaattgctgggtatctcgggggagctttgtgccttgatggatcaagttcatcatatgcagcactcaaaatggcagcatccttcggacctcaccacgcgaaactacgcccgccgacagaaacatctgcaaagatacagtctgactcagtgggttgacaggaacatgcgaagccaccatcggttccagcgtctcccagacttctcgtacagttaatttgtgtcatcccatcagcaatgaaggtccctatccagggtcttgcttggagcagcatttcatgttcttttgctgttttgtgctttgccgattttggattttatttttcacaaaatttttatttaaaaaactcgtcaccttttggaaatgcccattgccgacttgaatttttttgtatgaagtccctcctgattttgtgtgtgtgtgtctgtgtttaagcaagcgttcggttggtatagtttttttttgtttttttaatttaaattgaaggtagctgcctcctgaaagccagcattaagccagaacacccaggttcaagcaaaagacccacctctctgcagaggcaaagtctactttctggtacctcaaagaaatcattgttcaatcttccataaggaagagattctttaccaggctgtgagccagtgttagataacttgtgaatggatataagttacttttaacaacccctcttacttttttatttgaatcctctgaatacctgtcagtattttaaagttggcaatccaggacattataagtaggatggagcaggagaagaatcctattgaaaggacaaattaaaatagtaaatcctctcctctcccttctgtaggtactagctgccttgatttttttttgtgggtgggggggattttttcattccttattgaacttattttgcacaatagtgtttacaaatcttatacatcttactttgacagaagacttataataccttgtggtcttgagactggttgtctcctttgcctttcttcaaggattttcctttttctttttaccccccagtgaccactctgctctttaggattctagtggcagtattcttgtaacctgttagacgtggatatacctcttcaggatggcctccttgctgtctttattgaagagctgcccacccagagtcttgactctagggcaggctagtgctattgtggtgtcagttgatatttagtttcatttgctgaaccccaaatttgagtgttagttagggagcctccattctgtgggagagtgtggaaaggcactcttttttctccatattagttaacaagaggtgtctttaggccctggatgttaccatctcatttggtcaagcccctgatacctagtttcacatggatgctaacgtggatgtaatatagttgtgacagcctatgcacaaaagcattacctgatcttaaggtttggtattctaaccaaagttgacagactgtgcgtctgtcttaatggatgtcttaggagttggttattctctctttttttttgagacggagtttcgctgttgttgcccaggctggagtgcaatggcgtatctccactcaccacaacctccgcctcctgggttcaagggattctcctgtcttagcctcctgagtagctgtgattacaggcatgcgccaccatgcctggctaatttcatattttttagtagagacaggatttctccatgttggtcaggctggtcttgaactcctgacctcaggtgatctgcccacctcggcctcctaaagtgctgggattacaggcatgagccactgcacctggccggttattctctctttacagatagctatagacatcattttaggaagtgttgcagtctggcatttgtgctattgttcattctctgtgaaggctgttcatagttgctatagcctgtgtttagttttgtgatttcatcaatcccatctttctgtgtgagtaatgcattctaaacatcctaccccactttagaaacggacgtggggaacgcttggtcatttaagccaacaataaatttaggtgaatgtccctaagtgtttactgtttttatccagtcaaggatttgcttttccttgaacatttgttttaaattctggggccaaaatgcaaaggagaagttctattcaaaggcagtagttgaaatctattattttagttagcctacttggcatttactacatcggtcacttctccaggctgccctaaattaggttgatggagtgagacatgccaaacatccacctttgggaccatagcatagttaaaattaaatgtagttggaatagctagcattgcagctacagtagggaactgtagtctagttccctacagaaaacccaaggagtgaagggacaggattttgcctaggcaaaaatctaagactcgtgccctcctggtacatggggttttaagactgaatgtgtaataggagcactgcctttgccaaatcaaatgagtgacaggttaactagaaaatgtgacaatcacatttcctcttagctcaaataattctgtttttccaaagctttagcagcttaattaaatctgttggactgggggaggagagagctgttctctagtggttaacatggtattctttaagaagaaaaaacaaagccaaggaaaactcattatctggcatgttcgccttaaagatggtactgggtagaatctggagttttcatctcttttcaaagctgcatatctctcatatttggtattggcctctaagtctaatattgcagttggaattcttgctgtattattttttaagcaagtgttaggtgcatttaactgctttcttcatccatgacgacattcccaccatgggggtcttgacaaagcagagtaaaaatatgctgtttacattgtttacttacaagtaaggagcctgaaataacctgtagtttcgaatgcaggccctgatttactggcgttgtcagtttcaattatgaaactgaagtttggtgcctcctctttatcatgttttttcccttgtagcagttgtgtttaatgtcattaaaaagaaataaaagttctttgtcagtgacat

SEQ ID NO: 57610 - DNA, 3501 bp, Homo Sapiens
ctgagctcccgggctccggcagcgcgctggcggggcgccgcattgcacactctgggggcgccgcagtgttcgtgggatggggcagcgggctgcagctggcggccggaatccgcgcgcagcccgggtgcaagttctctcctgttgccctgagtgcccactcccaggccctctgtatgagtgacacttcagtctgccatggaacctggccctgctctggcctggctcctgctcctgagcctgctggcggattgtctgaaagctgctcagtcccgagacttcacagtgaaagacattatctacctccatccttcaaccacaccatatcctggtggatttaaatgtttcacctgtgaaaaggcagcagacaattatgagtgcaaccgatgggctccagacatctactgccctcgagagaccagatactgctacactcagcacacaatggaagtcacaggaaacagtatctcagtcaccaaacgctgtgtcccactggaagagtgcttatccactggctgcagagactccgagcatgaaggccacaaggtctgcacttcttgttgtgaaggaaatatctgtaacttgccactgccccgaaatgaaactgatgccacatttgccacgacgtcacctataaatcagacaaatgggcacccacgctgtatgtcagtgatagtgtcctgcttgtggttgtggttagggctcatgttatagtggctcagtggctccatgtgttaatagcgatccatggggatctcgatggtccacagacctgcatgagtcattggcctgacagtaattacacatgtgagacacaacactcttggaggtcatcacagccaagcattgccacttaccatgaggaataaatgttgcttcattgtagccattttgagtctaaccgagactcatcaaagccttctgtcagtacagcccaagttccataccataaacgtttgttttcattccaagaagtagttctgcatttatcgagatctggggttcttaatttggaagaatacatgcatgagatgcagtaggtcctgagactgtaagatattaggagtatgttataggggcatgtatagatgtgggcttttcaggagaaaagtaaccattggtttaaatataatcatgagttcatttgtagctttagaattttaaaacattgactccaaactgaatggactatttccttggaaattctgactgagtccctggaagagtagtaattccaacaattccagccatttgttcaattaattttcccaacattcttctcccagtgctgggaatcacatttcctctgttctgtgcagaagacaaaaaggcaatcataaaagtttgttatatttgtgggggtgcctggaggaggattttcctcaacttaatggagccactgtccataaagtggctgttatcccttcatataattggtgagatcagccttctccttgacttggcacctaattatgcttcatgagatcctagattccacctgagtcaattgtgtccagagccccaaaccaggatggagttgttttccccagatatggggttctattcagccatagataatctagacagaggatttcagaatgaaaggaaaaatgtgtggagattagtcctagttcattctgagggccgactaagtggctcagccagcttcttactccatctgcagttcatactgccaaagagctcccacttccaaatccccagtgactttatggagaagattctgcattaaattgtctttcgaatgatggggaagcaaggcataatatgcgatgatgaggagaaagtagaccagtgaggtgattgcaagactaacaaggagactcaatgggaagtttttctttcttttagatattgcttttgaagtagatggtaaaatttttgtcatccttcttgtattttttgtaccccaagttacaatttttcttcttccttgtaaataatttaaacagtatttatttttgtaaggcataactagaaactaaaatatattctaaaaaattcattattctgaacaaagtgatcaaattagaatacatatttttcaacagtggtagagcttttaatatatgtttattgaaagttatctataatacttgcaccagtgttgaaaaaagttaacatgtaggcaagagcaatatgtttgtctcaaggatttttccatggtttcctcagtgatggtgtcctggaattattcaggtggtgaccatcactggtctaagtttgtgtgcagggttttcagacgtgtttttgtgaaacttggtagaaccatggctaataaagaggacagtgttgtcagggtccatctgccctccatagaaaaatgtctctggctcataaaatgagactccctcagggactaaatatgaactgacagcagtaactctgatacagaataatctaaattgcatcaaatggccttaattcagagtttgttaggcttatcagtatgttgcttttaattggggtgggaaagtagagggagagaaagcaagacatttattaagcacctcgtatgtgccaggcactatgctaagcactttacataagttaggattaatccctgcaagaatcctataaagaatgttactagcatttacacttcccaaatgaaggtaccaaagctcaaacgcaatgttgtgaagctgtttccttcagatttaggttatgtgggatgatgtgggattgaagaggaaagaaaggtgggattatccccctaggaagactttcaggcctgacttcataggaattcatccatcttatcatgtggagtttatctcaccctgctgttgcaggatgctatttgcatgtgtccccaggtgatgttttttctttggggagtaggggtttggcttcctcattcatccctcttgctaaaagaggagatagttgatgttgcatctaaagatgctataagacaatgaaagtttgatgttgtacatacctacaagtaccatttttgtgcatgattacactccactgacatcttccaagtactacatgtgattgaataagaaacaagaaagtgaccacaccaaagcctccctggctggtgtacagggatcaggtccacagtggtgcagattcaaccaccacccagggagtgcttgcagactctgcatagatgttgctgcatgcgtcccatgtgcctgtcagaatggcagtgtttaattctcttgaaagaaagttatttgctcactatccccagcctcaaggagccaaggaagagtcattcacatggaaggtccgggactggtcagccactctgacttttctaccacattaaattctccattacatctcactattggtaatggcttaagtgtaaagagccatgatgtgtatattaagctatgtgccacatatttatttttagactctccacagcattcatgtcaatatgggattaatgcctaaactttgtaaatattgtacagtttgtaaatcaatgaataaaggttttgagtgtaaaaaaaaaaaaaaaaa

SEQ ID NO: 57611 - DNA, 5762 bp, Homo Sapiens
tcagaagaggcagaagtggatgtgagagaaagagagacacagagagacagagagccaaagagggcaagagacttgactttaagagactcctgtactgacaactccatgcagttcggaaccagaacgactacggctgaaccagggttcatggggacatggcaaaacgctgatactaacctcttattcagaatgtcccaacaggccatccgttgcacactggtaaactgcacatgtgaatgttttcagccagggaagattaacctgaggacttgtgatcagtgtaaacatggctgggtggcacatgccttggataagctcagcacgcagcacctgtaccaccccacccaagtggagattgtgcagtccaacgtcgtgtttgacatcagcagcctgatgctctatgggacacaagcagtgcctgtgcggctaaagatcctgctggaccgtctcttcagcgtcctgaagcaagaggaggtactgcacatactgcacggccttggctggactctgcgggactatgtccgaggatacatccttcaggatgctgctggcaaggtgctggaccgctgggccatcatgtctcgagaagaggaaatcatcacccttcagcagtttctgcggtttggagaaaccaaatccattgtggagctgatggcaattcaggagaaagaagggcaggccgtggctgtaccatcttcaaagacagactcagatataaggactttcattgagagcaataatcgcaccaggagtcccagcctccttgctcacttagagaacagcaatccttccagcattcatcacttcgaaaacatcccaaacagccttgcatttctgcttccattccagtacataaaccctgtctcagcaccactgctagggttgcctccaaatgggctactgttagagcaaccagggttgaggctgcgggaacccagcctttcaactcagaatgaatataatgagagcagcgaatccgaagtttctcccacaccttataagaatgatcaaacacccaatagaaatgccctgaccagcattactaatgtggagcccaaaaccgagccagcctgtgtctctcccattcagaattctgccccagtcagtgatctaaccaaaactgaacacccaaaaagctcattccggattcatcggatgagaaggatggggtcagcctctaggaaaggaagagtgttctgtaatgcatgtgggaagacattctatgacaaaggtactctcaaaattcattacaatgctgttcacctgaagatcaaacatcgatgcaccattgaaggttgcaacatggtctttagctccctccgaagtcgtaatcgccacagtgcaaaccccaatcctcgccttcacatgcctatgctaaggaataaccgagataaagatttaattcgggccacctcaggagctgccacccctgtcatagcaagtacaaaatcaaatctggcactcacaagccctggccgacccccaatgggttttaccactccccctctagaccctgtcttgcaaaatcctctccctagccagctagtattttctgggctaaagactgtacaaccagttcctccattttatagaagtttactcactccaggggaaatggtgagtcctccaacctccctcccaaccagtcccatcattccaaccagtggtaccatagagcagcaccccccgccaccctctgagccagtagtgccagcagtgatgatggccacccatgagcccagtgctgacctggcacccaagaaaaagcccaggaagtcaagcatgcctgtgaagattgagaaggaaattattgataccgccgatgagtttgatgatgaagatgatgaccccaatgatggtggagctgtggtcaatgacatgagccatgacaatcattgtcactcccaagaggagatgagcccaggcatgtctgtgaaggacttttctaagcataacaggacccggtgcatttcaaggactgaaataaggagggccgacagcatgacttctgaagaccaagaacctgagcgggactatgagaacgagtctgagtcttcggagcccaaactgggcgaggaatccatggaaggggatgagcacattcacagcgaagtgagtgaaaaagtcctgatgaatagtgagaggcctgatgagaaccacagtgagccctctcaccaggacgtcatcaaggtgaaggaagaatttacagaccccacttacgacatgttttacatgagccagtatggactgtacaatggtgggggtgccagcatggccgccttgcatgagagctttacatcgtctctgaattatggcagccctcaaaagttctccccagaaggtgacctatgttctagcccagaccccaaaatctgttatgtgtgcaagaagagtttcaaaagctcctacagtgtgaaacttcactacaggaacgttcacttgaaagagatgcacgtctgcacagtggctggttgcaatgctgcattcccctctcgccgaagccgagacagacacagtgccaacataaacctacatcgtaaactgttgaccaaagaactcgatgacatgggcctggactcgtcgcagccctcccttagcaaggacctccgcgatgaatttttggtgaagatatatggtgcccagcaccccatggggctcgatgtcagggaagacgcctcctctcccgcagggactgaagactcccacctgaacgggtatgggagaggcatggcagaggactacatggtccttgacttgagcaccacctccagcctccagtccagcagcagtatccattcctccagagaatccgacgcaggcagcgatgaggggattcttctcgatgacattgacggggcgagtgacagtggggagtcggcacacaaggccgaggcccctgccctccctggcagcctaggggctgaagtttcaggatctcttatgttcagcagcttgtctgggagcaatggtgggatcatgtgcaacatttgccacaaaatgtacagcaacaaggggaccctgagagtgcactacaaaactgtgcatttgagagaaatgcacaagtgcaaagtcccaggttgcaatatgatgttttcctctgtacgaagccgaaatcggcacagtcagaaccctaatctccacaaaaacattcccttcacttcagtagattagtctcagaatggacactacaaatgccagctctcaccagatggcctacgtgtttgaactgccatagtcagtgtgcgcttatgtacttggggtgtgtgtgtgtgtgtgtgtgtgtgtgcatttatgtatgctctgtggctacatatacacacacgtatttccttgagataaacaagataaacactaggtgcttttgaatttttttcacttccctttatagttttgggaaaggagtgggatctttgatttcagggtgaaaacagagtacccctttaaacacacacacacacacatgcacatacacacacacacacacacacacacacagtgtgcaactagccccagttttgacagaataattcttggtcttccccaaagagacaatttgttgtacccatgactgttgcctgcaaaaataaaagggaaaaaaaagaaaaaagaaacaaaaaggaacttcttatagttgtcttttgtgaactttaaggttttgaaagaatcttcaattaaagcatggcagattcacctgtaaatatttagccttgaggggccattgatgtaaaacaattgtattgatggttgtttaacttttttgtttaatttttacagttacatccagctgttagatatgcaggaaaagatagtttgctggctagctctattcatttatgttagcattaatgcacatttttaaaaaaagaaaaaaacatggtcttgtttttactacctgttagatatagtgctaaagaggtgctggcatgctttacagcacagatctgattttttaaaatgtcctgtactagtacataaatcccgtcatgcactttttttcatacactacaaggggatgtgtaataaccatgcttcttttttatccttaaactattgccatacttcagtaagtgtcttttttaaaaaaaattcacttgtataaaaatggtctggtcagtatagggcacaaatgccaaacaaagtattagtgttaacacaaaactgccaactttgcacaagtttccagaaaagaaaatacaattagtcactcaacataaccacaggccaatttgttggccaccagaaaaccgctttttaaaaaaacacttggtgattctttcaagtgccgaatgttattagaatcaacattgcatccttcttgcttatacgttaagttacataaaaggaaaacaaaattatgtggtgtgaaacagccaaggcatttattcttcagaggcaggataatatttcaggatacaaaagcccaaattacccgctacggaacaaagatgaatacagtaaaagagtcgaacactcatttccaaggccctaacccttatcctttaaaaagaaatcctctgaactgggtcggtctgttgtatggctgtctaatttgttgcaaattctgcagtcgtactataattcaggcctgtttggtagacaaaatcaaaaggcatttaacagcagcagtacttggaagctttgaaaacatgtgctaaacttgaatggagcaacactcctttctgaaaagccagaagaagggggttttaaagcaggatctctcaatgtttagtgttttgtgtttccccacacgatttgtcagagagaaatgaaagcaagcctgaaaccaagcaattgagagtgagaaagaggagagagactattctccaaaccttttttgttttgttttgtttccgatgtttacacatgttgcctgagctggttaaccacatcggcagcctcagctaccacaacatactgactaaatgatgatatttactcaagttcagtctgcagccaaaaccattagggtgtgcattgcagactgttttgttgtcttttttttttcttttttcctttttttttaagtggaggggaaaagaagagataaacaaggaatattttgtcaaacagtacacaataatttaaagagaatgtatttcttttttgcatttaatggcctcagacatttctttcatcagtctaaaagttagaaatatccctttattttaacttttatgtcgtttccatttttcatgtttttgtaattattttttctatgttcacatcagcattcacttccgttaaatttgccaaaggaaactgttaatatgtttctgttgttattattcctgtaggatttattgtacctcacagtatttattgtttcccaaaataagcatcattagttggggattcagtatttttgttgtgaaaatttcagaaacaatagattcttaaagataagctagctatgtctaggagctttatcttttcacctccttcagaggatgctatggggtccattttaattcttcatttgttctacggggaggaaagaccaaaagtatttgcagtacaaaagaaactatatcaaacactatgttaaatgacaagtgtttatggtaaaaagctgaggaattagtaataatcgtttttgttttcttgtactttgaattccccaaagtcttaattgctttattttggtgttgtgttaaattgaacagacagatgttttcctttgttttataccatataagactctgtacagtatgtttgtgaaagattgaactagaataatgaaagtttgtttgcaaacaaaaaaa

SEQ ID NO: 57612 - DNA, 18209 bp, Homo Sapiens; identical to SEQ ID NO: 30873

SEQ ID NO: 57613 - DNA, 1447 bp, Homo Sapiens
gctctcgctgggaatggcggagggagagaaaaaccaagatttcactttcaagatggaaagtccgtcagactcagctgtggttttacctagcactcctcaggcctctgcgaatccatcatctccctatacaaatagttcccgaaaacaacctatgagtgcaacacttagagaaagattaaggaaaacaagattttcatttaattcctcttacaatgtggtgaaacgtcttaaagtagagagtgaagaaaatgatcagaccttttcagagaaaccagcatcttccacagaggaaaactgtttggaatttcaagaaagttttaaacatatagacagtgaatttgaagaaaatacaaatttgaaaaatactttgaagaatctcaatgtctgtgaatctcagtcacttgattctggatcatgcagtgctctccaaaatgagtttgtgagtgagaagcttcctaaacaaagattaaacgctgaaaaagccaaattggtgaagcaggttcaggagaaagaagaccttcttcggaggctaaaactagtcaaaatgtatagatcaaagaatgatctgtctcagttacagttgttaataaagaagtggagaagctgtagccagctcttgctttatgagttgcagtcagctgtgtctgaagagaacaagaaactaagccttactcaattgatagaccactatgggttagatgataaattactacactataacagaagtgaagaagaatttatagatgtttaattcctgatttttgctccagaatatctttgagaatgacaacttaattaaaagatacttaggcactttttttttttttttgagactgagtttcgctcttgtcatcctggctggagtgtgatggtgcgatcttgactcactgcaacctctgcctctcgggttccagcaattctcctgcctcagcctcccgagtagctgagattacaggcgcccgccaccatgcccggctaatttttgcatttttagtagagactgggtttcaccacgttggccaggctggtctcgaactcctgacctcaggtgatccaccgcctaggcctcccaaaaccattagggctcagaggaaggtatcccaatgaatatcaattaagggcactttaatatataaattataaactaagttctaaaaggaaaattagtattttggatagatttgtcaaaacgacatttaagtcatgtttaaaaagtcatttgggcagttctggaaactagttttaatacatttgttttttatgacaaaaagttttattttaaatgttaaaaattgtccaatctggtgaatgtctaaccctaaagtttaaaaatttctgcctcctaagtttatgtaccttgtttccatccatttaccacatatttccatctgatagtctagcaggtaattaaacttatatgtccaaaaccataaaaaaaaaaaaaaaa

SEQ ID NO: 57614 - DNA, 2510 bp, Homo Sapiens
agagcgatcaggacgccacggctccgcctgaagcgatggcccagccctacccccccgcccagtacccccctccgccacagaacggcatccctgccgagtacgccccgcccccaccgcaccccacgcaggactactccggccagaccccggtccccacagagcatggcatgaccctgtacacaccagcacagacccaccccgagcagccaggctccgaggccagcacacagcccatcgccgggacccagacagtgccgcagacagacgaggcggcacagacggacagccagccgctccacccctccgaccctacagagaagcagcagcccaagcggctacacgtctccaacatccccttccggttcagggaccccgacttgcggcaaatgttcgggcaattcggaaaaattttagacgtggagatcatttttaacgagcggggctccaagggttttgggtttgtaacttttgaaactagctcagatgctgaccgagcccgggagaagctgaatgggacgatcgtagagggacggaaaattgaggtcaataatgccacggcccgagtgatgaccaacaagaagacggggaacccctacaccaacggctggaagctaaatccagtggtcggcgcagtctacgggcctgaattctatgcagtgacggggttcccctaccccaccaccggcacagccgttgcctaccggggcgcacatcttcggggccggggccgggccgtgtataatacatttcgggctgcgccacccccaccccccatcccgacttacggagcggtcgtgtatcaggatggattttatggtgctgagatttatggaggctacgcagcctacagatacgctcagcccgctgcagcggcggcagcctacagcgacagttacggcagagtctacgcagctgccgacccgtaccatcacaccatcgggcccgcggcgacctacagcattggaaccatgtgaaaccttccaccgtttccttctcggaccatgaagggcaaaaacaaaaaaacaaaaaaaatcacaaaacaaaaaaaacaaaaaaagatgttaagatccaagcaacaaaaaaaaaaccaaccaaaccaagaggcatccaaccaagtccaagtcccgcgtcctggccacacgcccgcaccgagggagcacgccggcaggggcgccgaggagcggccccaggacaggacggccccaccgcgtcctggctggcagcacagtgggaacacgcccctccgtctcaggcagtgggggagttggaggggaaggggcctcccttgtgggacccgtggggggctctgttttccatccagtcttcctttcccagcccccaactcccaagacagacagtgtggagcccagcggcggcggagcaggcccgggcctgagcaggcaggcgctgctagcaagacttgatctttgtggccagctgtgccagggggccggcggggctgaggggtgcgggcagctttcatcccaggggctccactgggccccgtcaccctcctgtcgcgtcccctgcgtcccacctccctcctgcccggcagtcccgcccgtgcccccagcctggcgaggaagccgtccaacagtagccccggggccagctcccaacagaaagggctgacgtggctccaggactcaggggcgctccatgggaggacgaaggaagcccagccagccaggagccactcctcacacctccaagtgtggccaagtgggccctgaggccaaggacttacttgctcttcctggccatctctccctttctggaggaggcccggggcctgtgtacaccaaggctgacctcgtgctgcctgctgggacccagccctccctgccgctcccctgtgagcccagtccaccgtgggcgcccagggccagggacgggccagcgcccggctgcatcgcgaggttgggagtcacagtggctgtgggcctggacgggcacagccagagcaggggcccatgggaagggcaagggatggggaagcctgggccggccccttccctgctcccaaggcaggtgtccaggtggcgggagcagcaccaaggacagccaggcttacccggtgggaggagcaggagcagagcaggtggcagggaggaacccctggcgaggcagggagcactgaagtagggaagcagcaaaaaatacaggctcccaacgtggctccactgtctcatgaagtgtcaaaaatttaaaaatacacctcactttctattcagcatcagctattgaaatggaattctccttttctattcccgttgtacatagccccacgccctgcctccggctttgtcctctgtacagagccccctgtcccctctgctgttccggacccttttcttgcagcagctcaaccccccgactcactcagatccccaggactgcagccgagccccgggcttcctttcttaccattctgtatgcttccaaggtgtgaccattcaaactaacagtattattaagattattaataaagatttctttcttcaaaccag

SEQ ID NO: 57615 - DNA, 2488 bp, Homo Sapiens; identical to SEQ ID NO: 27494

SEQ ID NO: 57616 - DNA, 3082 bp, Homo Sapiens
ctggaggcgccggcagcgcccgccagacccgccagcccagcggcccgggctctggggaaaccggcgctcccgacaggggagcaccgggcctctgagctccctcgggagcctttcacgaggtcagctacgtctttgttgtgcgcgttcctgaacttttggtccattaaccaacaattagacacgccggtattcagtgcctggcgcggtgctagatgctgggtgtaatctcagaaaaatacattcaggggcgcgcctgagggtgctggctgctggcatctcaggtgctttacgtgcattcgtgaagaagcccatcagtatttcttgaataccagaccccaagctaagtgaagctttagcctctaagctcaacatgtatgaagctttgccaggccctgctcctgaaaatgaagatggccttgtgaaagtgaaggaggaagatcccacctgggagcaggtgtgcaactcacaggagggcagctcccacactcaggagatttgccgcctgcgctttcggcacttctgctaccaggaggctcacggaccccaggaagctctggcccaactccgagaactttgtcatcaatggctgagaccggagatgcacaccaaggaacagataatggaactgctggtgctggagcagttcctgaccatcctgcccaaggagctccagccctgtgtgaagacatatcctctggagagtggagaggaggcagtgacagtgctggagaatctagagacaggaagtggagacacaggacaacaggcctctgtctatattcagggacaggacatgcacccaatggtggcagaatatcaaggagtctctttggagtgtcagagcctccagctcctgcctgggataaccaccctgaagtgtgaacctccacagcgtcctcaagggaacccccaagaagtgagtgggcctgttccccacggatcagctcatctccaggaaaaaaaccccagagacaaggctgtagtgcctgtgtttaacccagtcaggtcccagacattggtgaagactgaggaagaaacagcccaggccgttgctgcagagaagtggtcacatctgagtctgactcggaggaacctctgtgggaactcagctcaggagacagttatgagcctcagtccgatgactgaagaaattgtaactaaagatagattgtttaaagcaaagcaagaaacttctgaagaaatggaacaaagtggagaagcctcaggaaagcccaacagagagtgtgcaccccagattccttgtagtactcctattgctactgaaaggacagttgcacatttgaacactctgaaggaccgtcacccaggtgatttgtgggcccgcatgcacatctcatccctggaatatgctgcaggagacattacccgaaaagggagaaaaaaagacaaagctcgagtgagtgaactgctccaaggcctctcattctctggtgactcagatgtggaaaaagataatgagcctgagatccagcctgctcaaaagaagttaaaggtatcatgtttcccagaaaagagttggaccaaaagagacattaaacccaattttccaagctggtcagcactggattctggacttttgaatctcaagagcgaaaagttgaacccagtagagctttttgaattattttttgatgatgaaacattcaacttaattgtcaatgaaaccaataattatgcttctcagaaaaatgtcagcttggaagtcacagttcaggaaatgaggtgtgtgtttggtgtcttacttttgagtggatttatgaggcatcctagaagggaaatgtattgggaagtctctgacaccgatcagaacctggttagagatgcaatcagaagggacagatttgaattgattttctcaaacctgcactttgcagataatggccacctagatcaaaaagataagtttacaaagttgagacctctcataaaacaaatgaataaaaatttcctcttgtatgctcccctggaagaatactattgctttgataagtcaatgtgtgaatgctttgatagtgaccaattcctgaatggaaagcctattagaattggctataaaatttggtgtggtacaaccacacagggttatctggtttggtttgaaccctatcaagaagaatcaactatgaaggtagatgaggatcctgatcttgggttaggtggaaatctagtgatgaacttcgctgatgttcttttagagagaggtcagtatccctatcacctgtgttttgatagcttctttacaagtgtcaaattgttgtcagccttgaaaaagaagggggtgagggcaacaggaacaattcgtgagaacaggaccgaaaaatgtccccttatgaatgtagaacatatgaaaaaaatgaagagagggtattttgatttccgaatagaagaaaacaatgagataattttgtgtcgttggtatggggatggcattatcagtctgtgctccaatgctgtgggcatagaaccagtcaatgaggtaagctgttgtgatgctgataacgaagaaatccctcagataagtcaaccatccatagtaaaagtgtatgatgaatgcaaggaaggtgtagctaaaatggatcaaattatttcgaaatacagggtgaggataagaagcaagaaatggtactcaattttggtgagctacatgattgatgtagccatgaacaatgcatggcaactacacagagcctgtaacccaggtgcttctctagaccccttggattttcggagatttgttgcacatttctacttggaacacaatgctcatctgtcagattagggtacataaaatggacatagtgcagacattaataagacatagaaaaataataattatacatgctgttgtaccctcccaaagtaaatctgatatatgtaatgaagttattaaataatacttttaaaaatcagacatttatatagagtttcaaagactattgtaacaagtaatgttaaaaattgtctgtgagaatgttgaactgtagtacctttctctatgtcaagttttgtgtcagacatgggaaatcatgtatttgttcaattgaaaaaaaaaaaaaaaaaa

SEQ ID NO: 57617 - DNA, 2725 bp, Homo Sapiens; identical to SEQ ID NO: 31626

SEQ ID NO: 57618 - DNA, 3532 bp, Homo Sapiens; identical to SEQ ID NO: 23480

SEQ ID NO: 57619 - DNA, 2381 bp, Homo Sapiens
tgccaaccaccgcgcaggctgagccccaggcaggaagcagcccacttggtggggttggggtatgagtccttcctcgcgggggctcggtgggtcctgagtattctttggccggatttgctgatccgtctgctccagcataggttcacaaagtacagtccgcaggccagcagcatcatctgggaacttaggaaaaaaccagccctactgagtcagaaactggggatgtggcccaggcaatcttttaccaagacctccaggtgattataatgcaaggaaggattccctatcttggacctgaggctgctttcttgaagaaaacttgactttatttcatttagtgggaagagcagcagcccagctattaagttctaatatgcaataggctgcaggctgtgaagtgttcgtggcagtagactctgaagctaaggagctgagggcttaacaagtttctagaagctgccatcaacatgccaagtcagtaaaactgatagttgatcagatttcaaggtctggggagtatatccactgtgtactgggtcttgagctctagagagctaggccttgctaaaataaaagaattaccttacctaccatctttgttcaagtctcaatggaatttgttacggccctggctgacctccgagcagaggctagctgtcccatctgtctggactacttgaaagacccagtgaccatcagctgtgggcataacttctgtctctcctgcatcattatgtcctggaaggatctacatgatagtttcccctgccccttttgccacttttgctgtccagaaaggaaatttataagcaatccccagctgggtagtttgactgaaattgctaagcaactccagataagaagcaagaagaggaagaggcaggaagagaagcatgtgtgtaagaagcataatcaggttttgactttcttctgtcagaaagacctagagcttttatgtccaaggtgcagtttgtccactgatcaccagcatcactgtgtttggcccataaagaaggctgcctcctatcataggaaaaaactggaggaatacaatgcaccgtggaaggagagagtggaactaattgaaaaagtcataactatgcaaaccaggaaatcactggaactgaagaaaaaggtaaaacatagggcagaagaagtcaagtctgaatttgagcaacttaggttatttctccaaaatgagcaagagactgttcttaggcaattacaagatgaagagatggatattttagcacaactaaatgaaagcctaacaaaattttcagattatacctcctcattaaaatatctactaaaggagatagagagcatatatgtgaagtcagaactggaattactggcaaatgttaaggatatctatcacagatatgagaatttaaaattccctgagctgtttttattcaaattaaaaaaatatggttaccatctgcctccacaatattctggcctagacaaaattatcaagcgatttcaagtagatgtaattctagatcctgaaacagcacatcgtaaacttatagtctcagaagatagaaaaactgtgcgctatggaaatacaacacaaaatgtacctcataacccaagaagattttatctcctcccagctgttctgggttctaagggatatagttgtggcaggcagtactgggaagtagaagtgaaagacaagcctgaatggattcttggtgtctgtaatgactgtcttcccagaaggaggaagagtcaaccaattttagtacaggatggattatggggaatttggcgatctagtcagaataattatattgtattgggccacagggaaattattctgctgccacaagtaattcctagtaagattggcatttttttagactatgaaatgaatgaagtttccttttataatttgaatgatagatctcttctctatacttttaatgataattttacaggagcactttggccttatttttatactggaactgactcaaaacctcttaaaatttctacagtaacagattctgaatgaattattagaagactcagtttctttcacctagtagacataactgagccagtgaatctagttttggctattctgtattttgtccagtttttcccataagaaagcaatatttttttatctcagtttcagcaacttccaaaaaatgtgattatgggacctactttatattaaattatggggtcagtgacaaggtactttagaaattctacagtaaaatacttgaaacatatattactgaagaaatgtattatgtaagaaaatctattacttttgtaattgccaataaaagcccagtaatttttttctgtatttcttatatacttttcctttaagaaagattaagtctttattaaaggca

SEQ ID NO: 57620 - DNA, 1993 bp, Homo Sapiens
actcatttataccaggaaacagacaagagaacaagaggctgccgaagacaaaacttctctgcaagcacctgtgcacagcaatgtgcgtgggcatctgtgagaagaagagaatctgtgaagtttgagcaagcggccttcccaagatgtaccgaatatctcaactgatgtcaacaccagtagcaagttcttccaggttggaaagagaatatgctggagagctgtctcccacgtgcattttcccaagtttcacctgtgattccctggatggttaccattcttttgaatgcggctccatagatcccctgacaggctcccactatacctgtcgccgaagtcccagactcctcaccaatggctactatatttggactgaagacagcttcctgtgcgacaaagatggcaacataactctgaacccatcccagaccagcgttatgtataaggagaacttagttagtacctccaaatcttggctgcatggaagtatctttggtgacatcaactcttctccaagtgaagacaactggttgaaggggaccaggaggttggacacagaccattgcaatggaaatgcagatgatttagactgttcttctctgactgatgactgggagtcagggaagatgaatgcagagtctgtgatcacctcctcttccagccacatcatatctcagcctcctggaggaaactcccatagcttgtctcttcagtcccagttgacagcttctgaacgtttccaagagaatagttcggatcattcagaaaccaggttgttgcaagaggtcttctttcaggcaatcctgcttgctgtgtgcttaatcacttctgcatgtgcaagatggtttatgggagaaatattagccagtgtcttcacatgctcattgatgataactgtagcttatgtgaaatcattgtttctcagccttgccagctatttcaaaaccactgcctgtgctcggtttgtcaaaatttgacaaccatttaggaatgccttcgatgaatgtcctccatctgaatatctggaaattgtccaacttgcagtctacttggaatcaagtgttttattggaagggagtaagcgagtaatggagaaaaagccattttagtttgactatgtgattttaaaatgatctcagtttttccatcaaaattataatatgctcatgaaaataatattaatttgccttccctttgcaaacaccggcagttgaaaggaaaaggacggggaatgtgatggaaaagagaccgcctggaataaatgtccccctatgattctttaaggcagtggttctcgagcttgaattttcattaggaaattctgtgaggagcttgtaaccagatttctgggtctgccacatgcacctatctcttgctgaattgctttaatagaataatgagagcaagtttgtctaactaataccaacctgacaacttgaataacaataaatgcaatttgtacataaaatataatgctgcaaaagtttgtcattcacctcagtggagtgacttgatattaggtggtaaccgtagatgatggttaatatgaaaatggacaggaaagaagcattttctgaaagttatattcttttgaaccacgttctaaaccaagtttttaatcttcttggggctcgtaattacctttcactttaatgtcacttaaagatataacacagaaaaatgccttgagggcaaaatataggcaaaacaccaatgcgctttcaaatgcatgaaaatggtgcagttgtacccttgagccttgactcaagggctgtagatgttccctttccaccccccacacttggtgcgtgttcacaaagcaaatatggcctgtaattcaaatttgttctatgtgatactctctgagtaaaaactcatacatgcagaaaattgtctttgctcgaaatgataatgccaaaatataactttatatataatttgcatttagtacatttttggttaaaaaataaactaataaataagtgaagtcatcagc

SEQ ID NO: 57621 - DNA, 1437 bp, Homo Sapiens
agtgtgtaagacgctcacgggcgcgcggactatcgggcggctaggctctctgaggaggctgccacagtgaagcaaccgtgacaagtggtgcccgaccagggacctgaacgaggaaggtctgccagagcagagaaagtgaaactgatcagacgaactacgaacccctggacgggagagtctgccggcggagaatataaggagatggacaaaccgtgtgggtgccctccaggtgtgtgtgaccatggaacgggagaccggagggatccatggtattcaaccgtgggcctgttacctccagtacgagccatgagccagcggaatctgaatgcaaagacagaacaagggccgaccggagtcacaatgacatccaaccccataacatggggacagatcaagaaaacgacacaagaagctgagaaactactggagcgccagggtcaggcaaaaacccctgactccatgttcttggccatgctagctgtagtgtcctgtgcgtctataggatcgggtgaaccaccaaccggcaattgaaagctgcacagcctgaaattacctttattcaattaatgcaaaaacaaaaggggagatgttggaggccgaaggaatgagggtcgtgaccaactcagtataccactggaggctctgtgagcaaacagcaaactgttctcatgaaagcaggatgttggcgaactgacaaactctgtctgccgccagaaggaatgctgggggcagtcatgtcccaggtcccgtgctccttgaggttatccacaggaacatccagaacctgttgaacaaagaaaggaatcatgtgggcctgtgttaaatcaaatagctgaccgacagttatcccttcctccctattcactctacctaataaatatgaagggctgtaaaagctcaggtccctgttccctaatatcaaggagccccctgaccccttctttcaaacagatccttttgtctgtctcatttctgcattcgtcgtccttcgttcggtccagaagcaaccgcgacagtcctgcatgtgttgatgccacctgtatgtgcaggtgtgacctcaggtgtgtgagtatccctcataccccttatcatcactgcctattcgctcttcctccagcctctggcaaccactaatccacgttatatgtctagatttgcctcttctggacacttcatataaatggagtcatacaatatgtggtttcttgtgtctggctttttaccactgaacgttttcagagttcatccatgttgtagcatgtatcagtttttcattcctctttatggctgaataatactgcattgtatggatataccacagtttgtttactcattagttcatagacattggggttgtttccaactctctgatattataaatgctactgctgtgaaaaaaaaaaaaaaaaaaaaaaaaaaaaaaaaaaaaaaaaaaaa

SEQ ID NO: 57622 - DNA, 1669 bp, Homo Sapiens; identical to SEQ ID NO: 26678

SEQ ID NO: 57623 - DNA, 2479 bp, Homo Sapiens
tgaacatggagcccccggacgcaccggcccaggcgcgcggggccccgcggctgctgttgctcgcagtcctgctggcggcgcacccagatgcccaggcggaggtgcgcttgtctgtacccccgctggtggaggtgatgcgaggaaagtctgtcattctggactgcacccctacgggaacccacgaccattatatgctggaatggttccttaccgaccgctcgggagctcgcccccgcctagcctcggctgagatgcagggctctgagctccaggtcacaatgcacgacacccggggccgcagtcccccataccagctggactcccaggggcgcctggtgctggctgaggcccaggtgggcgacgagcgagactacgtgtgcgtggtgagggcaggggcggcaggcactgctgaggccactgcgcggctcaacgtgtttgcaaagccagaggccactgaggtctcccccaacaaagggacactgtctgtgatggaggactctgcccaggagatcgccacctgcaacagccggaacgggaacccggcccccaagatcacgtggtatcgcaacgggcagcgcctggaggtgcccgtagagatgaacccagagggctacatgaccagccgcacggtccgggaggcctcgggcctgctctccctcaccagcaccctctacctgcggctccgcaaggatgaccgagacgccagcttccactgcgccgcccactacagcctgcccgagggccgccacggccgcctggacagccccaccttccacctcaccctgcactatcccacggagcacgtgcagttctgggtgggcagcccgtccaccccagcaggctgggtacgcgagggtgacactgtccagctgctctgccggggggacggcagccccagcccggagtatacgcttttccgccttcaggatgagcaggaggaagtgctgaatgtgaatctcgaggggaacttgaccctggagggagtgacccggggccagagcgggacctatggctgcagagtggaggattacgacgcggcagatgacgtgcagctctccaagacgctggagctgcgcgtggcctatctggaccccctggagctcagcgaggggaaggtgctttccttacctctaaacagcagtgcagtcgtgaactgctccgtgcacggcctgcccacccctgccctacgctggaccaaggactccactcccctgggcgatggccccatgctgtcgctcagttctatcaccttcgattccaatggcacctacgtatgtgaggcctccctgcccacagtcccggtcctcagccgcacccagaacttcacgctgctggtccaaggctcgccagagctaaagacagcggaaatagagcccaaggcagatggcagctggagggaaggagacgaagtcacactcatctgctctgcccgcggccatccagaccccaaactcagctggagccaattggggggcagccccgcagagccaatccccggacggcagggttgggtgagcagctctctgaccctgaaagtgaccagcgccctgagccgcgatggcatctcctgtgaagcctccaacccccacgggaacaagcgccatgtcttccacttcggcaccgtgagcccccagacctcccaggctggagtggccgtcatggccgtggccgtcagcgtgggcctcctgctcctcgtcgttgctgtcttctactgcgtgagacgcaaagggggcccctgctgccgccagcggcgggagaagggggctccgccgccaggggagccagggctgagccactcggggtcggagcaaccagagcagaccggccttctcatgggaggtgcctccggaggagccaggggtggcagcgggggcttcggagacgagtgctgagccaagaacctcctagaggctgtccctggacctggagctgcaggcatcagagaaccagccctgctcacgccatgcccgcccccgccttccctcttccctcttccctctccctgcccagccctcccttccttcctctgccggcaaggcagggacccacagtggctgcctgcctccgggagggaaggagagggagggtgggtgggtgggagggggccttcctccagggaatgtgactctcccaggccccagaatagctcctggacccaagcccaaggcccagcctgggacaaggctccgagggtcggctggccggagctatttttacctcccgcctcccttgctggtccccccacctgacgtcttgctgcagagtctgacactggattcccccccctcaccccgcccctggtcccactcctgcccccgccctacctccgccccaccccatcatctgtggacactggagtctggaataaatgctgtttgtcacatcaaaaaaaaaaaaaaaaaaaaaaaaaaaaaaaaaaaaaaaaaaaaaaaaaaaaaaaaaaaaaaaaaaaaaaaaaaaaaaaaaaaaaaaaaaaaaa

SEQ ID NO: 57624 - DNA, 3411 bp, Homo Sapiens
gcagccgagcagcctggcaacggcggtggcgcccggagcccgagagtttccaggatggcttctgcatcaacttctaaatataattcacactccttggagaatgagtctattaagaggacgtctcgagatggagtcaatcgagatctcactgaggctgttcctcgacttccaggagaaacactaatcactgacaaagaagttatttacatatgtcctttcaatggccccattaagggaagagtttacatcacaaattatcgtctttatttaagaagtttggaaacggattcttctctaatacttgatgttcctctgggtgtgatctcgagaattgaaaaaatgggaggcgcgacaagtagaggagaaaattcctatggtctagatattacttgtaaagacatgagaaacctgaggttcgctttgaaacaggaaggccacagcagaagagatatgtttgagatcctcacgagatacgcgtttcccctggctcacagtctgccattatttgcatttttaaatgaagaaaagtttaacgtggatggatggacagtttacaatccagtggaagaatacaggaggcagggcttgcccaatcaccattggagaataacttttattaataagtgctatgagctctgtgacacttaccctgctcttttggtggttccgtatcgtgcctcagatgatgacctccggagagttgcaacttttaggtcccgaaatcgaattccagtgctgtcatggattcatccagaaaataagacggtcattgtgcgttgcagtcagcctcttgtcggtatgagtgggaaacgaaataaagatgatgagaaatatctcgatgttatcagggagactaataaacaaatttctaaactcaccatttatgatgcaagacccagcgtaaatgcagtggccaacaaggcaacaggaggaggatatgaaagtgatgatgcatatcataacgccgaacttttcttcttagacattcataatattcatgttatgcgggaatctttaaaaaaagtgaaggacattgtttatcctaatgtagaagaatctcattggttgtccagtttggagtctactcattggttagaacatatcaagctcgttttgacaggagccattcaagtagcagacaaagtttcttcagggaagagttcagtgcttgtgcattgcagtgacggatgggacaggactgctcagctgacatccttggccatgctgatgttggatagcttctataggagcattgaagggttcgaaatactggtacaaaaagaatggataagttttggacataaatttgcatctcgaataggtcatggtgataaaaaccacaccgatgctgaccgttctcctatttttctccagtttattgattgtgtgtggcaaatgtcaaaacagttccctacagcttttgaattcaatgaacaatttttgattataattttggatcatctgtatagttgccgatttggtactttcttattcaactgtgaatctgctcgagaaagacagaaggttacagaaaggactgtttctttatggtcactgataaacagtaataaagaaaaattcaaaaaccccttctatactaaagaaatcaatcgagttttatatccagttgccagtatgcgtcacttggaactctgggtgaattactacattagatggaaccccaggatcaagcaacaacagccgaatccagtggagcagcgttacatggagctcttagccttacgcgacgaatacataaagcggcttgaggaactgcagctcgccaactctgccaagctttctgatcccccaacttcaccttccagtccttcgcaaatgatgccccatgtgcaaactcacttctgaggggggaccctggcaccgcattagagctcgaaataaaggcgatagctgactttcatttggggcatttgtaaaaagtagattaaaatatttgcctccatgtagaacttgaactaacataatcttaaactcttgaatatgtgccttctagaatacatattacaagaaaactacagggtccacacggcaatcagaagaaaggagctgagatgaggttttggaaaaccctgacacctttaaaaagcagtttttgaaagacaaaatttagatttaatttacgtcttgagaaatactatatatacaatatatatggggggggcttaattgaaacaacattattttaaaatcaaaggggatatatgtttgtggaatggattttcctgaagctgcttaacagttgctttggattctctaagatgaatccaaatgtgaaagatgcatgttactgccaaaaccaaattgagctcagcttcctaggcattacccaaaagcaaggtgtttaagtaattgccagcttttataccatcatgagtggtgacttaaggagaaatagctgtatagatgagtttttcattatttggaaatttaggggtagaaaatgttttcccctaattttccagagaagcctatttttatatttttaaaaaactgacagggcccagttaaatatgatttgcattttttaaatttgccagttttattttctaaattctttcatgagcttgcctaaaattcggaatggttttcgggttgtggcaaaccccaaagagagcactgtccaaggatgtcgggagcatcctgctgcttaggggaatgttttcgcaaatgttgctctagtcagtccagctcatctgccaaaatgtagggctaccgtcttggatgcatgagctattgctagagcatcatccttagaaatcagtgccccagatgtacatgtgttgagcgtattcttgaagtattgtgtttatgcatttcaatttcaatggtgttggcttcccctccccaccccacgcgtgcataaaaactggttctacaaatttttacttgaagtaccaggccgtttgctttttcaggttgttttgttttatagtattaagtgaaattttaaatgcacagttctatttgctatctgaactaattcatttattaagtatatttgtaaaagctaaggctcgagttaaaacaatgaagtgttttacaatgatttgtaaaggactatttataactaatatggttttgttttcaatgaattaagaaagattaaatatatctttgtaaattattttatgtcatagtttaattggtctcccaagtaagacatctcaaatacagtagtataatgtatgaattttgtaagtataagaaattttattagacattctcttactttttgtaaatgctgtaaatatttcataaattaacaaagtgtcactccataaaaagaaagctaatactaatagcctaaaagattttgtgaaatttcatgaaaactttttaatggcaataatgactaaagacctgctgtaataaatgtattaactgaaacct

SEQ ID NO: 57625 - DNA, 4472 bp, Homo Sapiens
ctctactcactggccatcttcgtggtgatcactgtgcactttggggcccaggacatcttaaccctttatgaactaagcacacccctctgctgggactccaaactaatcggctatggttctgcagctcagcatctcccctacctcaccagcctgctggccctgaagctcctgcagtactgcctggccgatgcctgggtagctgagatcggcctggccttcaacatcctggggatggtggtctttgcctttgccactatcacgcctctcatgttcacaggtgctctcttttctggtgtggcctgtgtgaatagcctggccatgctgacggcctccggcatcttcaactcactctacccagccactctgaactttatgaaggggttccccttcctcctgggagctggcctcctgctcatcccggctgttctgattgggatgctggaaaaggctgatcctcacctcgagttccagcagtttccccagagcccctgatctgcctggaccagaagacagagggcaagaggagcaaagtgaacaccaagcaactggaggtctgcagctggaagcccagcccacagcaggacaagcaactcttgtctaagggcagtgctctctttggacgaggtagtcaagagagaccaaggcaccaccccatccacagctgacccagcctctgtctaggatctagaatcataacccacacaggcccactgcaggacaggtggcagaggagctatttgggacaggagtcagttctccctttctgctatccatcacttataaccccacaggccagaggagaggtcctgagagaggtgacacttcagggaccagaggcagcacgagggctggcatctctccttccagcccaaactgcacagccccaaccaggttcccaacacgtgtagcagtcatcagccattccttaacaatgaatgtggtacctggttagtgccagccttgggaaggagggagggaggtaagaggggcttggtgatctctggaggaagagtgttgcctttgctgtggttggggaatcgatccttggctatggcctacccactcccctggctgaagagtgccaatcattacaaatcagcttcagcaaactgaaacaaaccttctggtgccttgggctttggggccctctgttttcctgctcccagtctgcctgccatacgttagacaacagaagctgctgggctgggcaggagccctgagctgcctggtggattggtaccaagtggggccagccagggcttctactgactcgctgtgcaaccttgagcaagccccactaggaacggctagatcagcaatgccccaaattgttgaatcgtggtgatcacatttggatggacaagttaggaaacttagctgattctctgagatacttcccacttcctcatacattctacagtgagatgcctctcttcatgggcctggggaaaggatgaatgagtgtggctggacttttgacctttaatgtccctgagcagttcttggcccttggggagaagtagggggaggatctggctgactcagccccaaccgaggggtagcagctgcagcccagccaagcagaacaccctggccctacagacctgtgtctgagcaggctttggaggaaaggccacttctgagtcctctgtctcgggagaagccaggcctaggtgcttgacctggtgatctgagctgtgtttgtcctagtatgggtggcagtcacctctgaacgcactggccttggcttagaggaggcttgtgacttcagctgttccagctggggctggatgctggactctgattccctcagagagacagaagatcgggcagaggtcaaccagaaggccacacagggcagtggacaacagtggagggtataccaaatagaaataaaatgcaggaaacctctctgaatactgcccttggggacctcaggagggagtgggactgattggagacaaagagccagaaatcatcccctggagatactcagacactgtattgttattggcgctgtcctgtgagggcagtgtccaggctgccctgcttgtcatatccatgccctggctctggccccggtgagcacttgtgctgcatgaggaaaggaggatcaggtggggtcaaaaccaaagcatcgaggctggcactggccaagacagactctggcagggaggggagtggaaggaaggagccccaaacctggagtgagacctttgactttctgatgatgtggccaagaactaggagtcacctggccagcacagccaagagtggggctgggggcgcagccagctttaaggtgtcaacacctggcccttgcggggaaagagccttcagcagcccccacggcctggagcctgggtttattggagggtgctttcttaccctctgaacccagtggaggagggggcaatgggatattcctgctctgtatggcctctgggtcagctttttgttgcaaaatcctatcccccgctgctagattctttgaagcaagggagaagcaatagcccagcctcagaatgattctcaggaaagcaattccactgccagtggactgggtgccaggaggcctaggtctggatctggggctgccactaatgacaggaaagtgggcttatcctcaacctttctgagcctcagtgtcattatctgtaaaatggggatgataataccaggtagagttgctctgatgactggagaccatggagcggagtgtttgggaaatggcaaagatttgtgagggcttcgtgctttagagatttgctacccttaaccaccagcatcagctcacctgggaatctgtaagaaatgcagagtcctaggccccaccccagatctcctgattttaacaacattcccaggtgacttggatgcatgttaaagttggagaagctgccctaagtgacaaccctttgccttttcaggactttgcctctttccacagagctgcaggttctgtctaggctgcttttactgccatgggggctgcctggtccctgagtaagcagtgggtagccctggatggctgaggggctggggaagccagctgggccagaccaggaaggagcctgaggcacagcaccaaggcatggggtagggtgggctttgaggcacggcctccccatgcccagacccaggcccaaacaggaggctcctgtgcaccagcaagtgcagcaaagctggctgcagtgacaaggaagtcagagggagggctggtttgcctcaaccctcgccctggatgtggcaaaagataccacaccgaaggaagctgtaggggatctgggacttagtcaggctagctaagggcactgagtgattacagggcaaggccacagagcggcaggaagttgtaagtgcaggggccaggcacagtctgagtggagagccatgatggcactcatccctggctggctcctgggcccaggcccttgctcagaatacagtgcccaggcccgcctgggcattgccttaattcctgtctgaggctgccttccgtcatcctcctcaagctgactgctatcagcaggagaagggaatgcagaaccacacccaccccaactccagtgtctccagaactgagcagggaccctccccatgacggagacagacaacccaatggcagggcctgggggagttctaacctcccgtgcccaagcctgacttcccttccctctccagatactgaggaaagtgggttggaggtgggccatgagggtgggggacagggggagggagagccatttcctaagaagagcccaggttgtctcagcccagggagactggtttcaggagctgttccttcagaaaggacgatggaaatggaagtcacagcagggctggggaactggggactggttaggttggacccatgggtgcagcaccctccaaactggtgtcagagcctgcagatgagtcccgggaggagcggccctgcaggaagcggatgatcttctcaatggtggcctcctggtattcgtgggaccacctgtgggcacaggagccaatgtggttcagacagctgggcagagggagctgctagtcagctgtttgcccacactctgcctgtcatggtgatttgtaccctacccccctggtcccagggccctggggctcacttgataccgttgaaagtaagcacagcctgcatgtcctcaggcaggacctggggctcaggccactcgaagccatcaatgatgggcacaatgttcttgccgcagcttaaagcagtcacaatctcctggagaaagaaaggaaaggaggaagatacccctgtacccatttagggacccttgtagccaggcaggtgctgggaggcccactggcccgaggctgggcccagggcaggacaccagtcctgatgtccaccttgatgtctaccttaacccttgtagtgtaataaaaaataaatatttttcctttgcccagagttcctagcacagagctgctaaaacccttggaatctcttg

SEQ ID NO: 57626 - DNA, 2623 bp, Homo Sapiens
ccgcctaccagggcgactttaccattgaggtgccgccctccacccagcggctggtggtgacttttgtggaccccagcggtgagttcatggacgctgtccgggtcttgccttttgatcctcgaggtgccggcgtgtaccacgaggtcaaggccatgcggaagaaagccccggtcattttacataccagccagagcaacacgatccccctgggcgagctggaagatgaggcgcccctgggcgagctggtcctgccttctggcgctttccgcagagccgacggcaaaccctactcggggcctgtggaggcccgggtgacgttcgtggacccccgagacctcacctcggcggcgtctgcccccagtgacctgcgcttcgtggacagcgacggcgagctggctccactgcgcacctacggcatgttctccgtggacctccgtgcgcccggctccgcggagcagctgcaggtggggccggtggccgtgcgggtggccgccagccagatccacatgccaggccacgtggaggccctcaagctgtggtcgctgaaccccgagaccggcttgtgggaggaggagagcggcttccggcgcgaggggtcctcgggcccccgggtgcgccgggaggagcgcgtcttcctggtgggcaacgtggagatccgggagcggcgcctgttcaatctggacgtgcctgagcgccgccgctgcttcgtgaaggtgcgcgcctacgccaacgacaagttcacccccagcgagcaggtggagggcgtggtggtcacgctggtcaatctggagcccgcccccggcttctccgccaacccccgtgcctggggccgctttgacagcgcggtcaccggccccaatggcgcctgcctccccgccttctgcgacgccgacaggccagacgcctacaccgccctggtcaccgccaccctgggcggcgaggagctggagccggccccttccttgccccgcccactcccggccaccgtgggcgtcacccagccctacctggacaggctggggtaccgtcggacggaccacgacgatcccgccttcaagcgtaacggcttccgcatcaacctcgccaagcccaggccaggtgaccccgccgaggccaatgggcctgtgtacccgtggcgcagcctgcgggaatgccagggggccccggtgactgccagccacttccgcttcgccagggtggaggcggacaagtacgagtacaacgtggtccccttccgagagggcacacctgcctcctggactggcgatctcctggcctggtggcccaacccgcaggagttccgggcctgcttcctcaaggtgaagatccagggtccccaggagtatatggtccgctcccacaacgcagggggcagccacccacgcacccgcggccagctctacggacttcgggatgcccggagtgtgcgagaccccgagcgtccgggcacctcggcagcctgcgtggagttcaagtgcagcgggatgctgttcgaccagcggcaggtggacaggacgctggtgaccattatgccccagggcagctgccggcgcgtggccgtcaacggactccttcgggattacctgacccggcaccccccaccggtgcccgcggaggacccagctgccttctccatgctggcccccctagaccctctgggccacaactatggcgtctacactgtcactgaccagagcccacgcttggccaaggagatcgccattggccgctgctttgatggttcctctgacggcttctccagagagatgaaggctgatgccggcacagccgtcaccttccagtgccgggagccaccggccggacgacccagcctcttccagaggctgctggagtccccggcgacagcacttggtgacatccgcagggagatgagcgaggcggcgcaggcacaggcccgggcctcaggtcccctccgcacccgccggggtagggtccggcagtgacctgggcaggggcctcgctttcccacctccctccagactcctttgaccccaggaagttttgcccctccttcttctccagacagccccctccccaggtgtctgggtcccctttcccgcccctttccagaactcagagtcagacaagaacccagagcatccgatggtagaaacaccaggaagacaattgttgctgtgtggtatggaatggagtttgcggtgactctggggccagcacccaggggacgacgttcaaccctagcctgaagggacccgctcccagctcagaagccgtctctgacttctcgtgcgtattttgaccctgatttcaatcttctacccttgggagttctggcgtttggcacaaagtcccctctgcctgtttggagctcagtgctagaccaggtcccctgccccgagctttgtttttggggttatttattgaaacaaagtgtggggagctggttgtgggtgtgagtgggggtgtggggtccaggctgggcccagtgaaaaggaggaaggggttcccatgcgggggaggctctggggctgaggggaacaattctcacgtgtttggtgcttagagacctgcccggggcgttgggcaggccctccgggggctgaattaaaaatgctttatttccaaaaaaaaaaaaaaaaaa

SEQ ID NO: 57627 - DNA, 1876 bp, Homo Sapiens
agccttctgcactcacagccgaagggaaagcagcaggttggggcttcttgtggccaacttcagagcctgtcaccaggaaaggtaagcatgggaggaaggaagatggcgacagatgaagaaaatgtctatggtttagaagagaacgctcagtcccggcaggagtccacgcggaggctcatccttgttgggagaacaggggccgggaagagcgccactgggaacagcatcctgggccagagacggttcttctccaggctgggggccacgtctgtgaccagggcctgcaccacgggcagccgcaggtgggacaagtgccacgtggaagtcgtggacactccggacattttcagctcccaagtgtccaagacagatcctggctgtgaggagagaggtcactgctacctgctctcggcccccggaccccacgcgctgctcctggtgacccagttgggtcggttcaccgcccaggaccagcaggcggtgaggcaggtgagggacatgttcggggaggacgtcctaaaatggatggtcatcgtcttcaccaggaaggaggacctggccgggggctccctgcacgattacgtgagcaacacagagaaccgggccttgcgcgagctggtggccgagtgcgggggccgggtctgtgcctttgataaccgggccaccggccgggagcaggaagcccaggtggagcagctgctggggatggtcgagggcttggtgctggagcacaagggcgcccattactccaacgaggtgtatgagctggcgcaggtgctgcgctgggcagtccctgaggagcggctccggcgggtggcggagcgcgtggcagccagggtgcagaggaggccatggggcgcctggctgtcggcccggctgtggaagtggctgaagtcccccaggagctggaggctgggcctggccctgctgctggggggcgcgctcctgttctgggtgctgctccacaggcggtggtcggaggccgttgcggaggtcgggcctgactgacagcgcaggtcctaaaactgaaggcaacttggttaagggaggctgaattcttggagctgaagggaaaacttcattccaacggaaggaatcctgtagtttcaggcatagttttaatgacacagaaaactttgctgcatcacctttgcaactttgccaaagctcagagttcactttttaagtttttaactcattttaaatgatgtgtatgcagagttttaaaataaattcgtctaacaataacttcctttggtagttttggtagtctaatgtcaagtagcttgtagtggggacaaacgcatggcacagggaaaacaagtgccattattttcgagctttttaaaaaatttagactgcccctccttgataattttctagttcttatacatgggtagataggttcctttgtgatccttgtagacttttagcatcaataaaagaaatgtgggggttacacacgtgaatgttacttctgagacatcagtttatagtacaatgatttactaccaaaaagatgaatgtaactgtactgttacaaagtggaaaataacagtttccacttttctagaacatattatggttcatggcattccaaaatgaagtaagggccgggcgaggtggctcgcgcctgtgatcccagcactttgggaggtcgaggcaggtggatcacctgaggtcaggagttcgagaccagcctgaccaacatggcgaaaccccatctctactaaaaatacaaaaattagccaggcgtgatagcactcgcctgtaatcccagccattcaggaggctgaggcgggagaatcacttgatgcagtgagccgagatcgtgccactgcactccaggctgggtgacaaagcaagaatctgtctc

SEQ ID NO: 57628 - DNA, 1423 bp, Homo Sapiens
ggcacgaggctcgccgctgccccggctccgccgctcgcagagagattcggaggagcccgggcgggggggaggaggagggggaggagggagcggagatctcggggctcggagccggccgccgctccgctccgatcgctgtggggcttggttttttgggggtgggggggcgggggggctcagatatggaggcaaatgggagccaaggcacctcgggcagcgccaacgactcccagcacgaccccggtaaaatgtttatcggtggactgagctggcagacctcaccagatagccttagagactattttagcaaatttggagaaattagagaatgtatggtcatgagagatcccactacgaaacgctccagaggcttcggtttcgtcacgttcgcagacccagcaagtgtagataaagtattaggtcagccccaccatgagttagattccaagacgattgaccccaaagttgcatttcctcgtcgagcgcaacccaagatggtcacgagaacaaagaaaatatttgtaggcgggttatctgcgaacacagtagtggaagatgtaaagcaatatttcgagcagtttggcaaggtggaagatgcaatgctgatgtttgataaaactaccaacaggcacagagggtttggctttgtcacttttgagaatgaagatgttgtggagaaagtctgtgagattcatttccatgaaatcaataataaaatggtagaatgtaagaaagctcagccgaaagaagtcatgttcccacctgggacaagaggccgggcccggggactgccttacaccatggacgcgttcatgcttggcatggggatgctgggatatcccaacttcgtggcgacctatggccgtggctaccccggatttgctccaagctatggctatcagttcccaggcttcccagcagcggcttatggaccagtggcagcagcggcggtggcggcagcaagaggatcaggctccaacccggcgcggcccggaggcttcccgggggccaacagcccaggacctgtcgccgatctctacggccctgccagccaggactccggagtggggaattacataagtgcggccagcccacagccgggctcgggcttcggccacggcatagctggacctttgattgcaacggcctttacaaatggataccattgagcaggtgctttcgttgccatctcactctgagagcatacctggatgtccaggcaagactgggcgaagtttctgagtggccctttgtttaggtgatgtcctcagacctggacccccaccagcctcactccccatcccaaccagagatggctcacttcggatcgagggttgactacatctcatcatctcacgaatctgctgtaatataagacaacagcttttaaatgtgtatataacccaaaaaaaaaaaaaaaaaa

SEQ ID NO: 57629 - DNA, 1892 bp, Homo Sapiens
ggggaagaagaaatgtgtggaaacaagaacttcctttatcgttcagagtgtccagaggagagacaaaatgggaaggcaaagcttatctcccttggagttattttccaccaaatgtgacaaaattcaattcatttgcaattcatggatcaaaagataaacgaagttatgaagctctttaccctgtacctcagcatgaactgcagcgaggacaaaaacctgatttccattgcctagaatacttcaagtctttcaattttaacacactgcttggagaagagtggaaacaaccggaatcagacctgtggctaatagagaaatgtgatatataggagtaatagataaccataccgatcattttttcctctataccttttaagataaacaaaaaataaatatcaattttttaagatgtcatgcatacatttcaacaacaaatatcttcatagaagtcactgaaaatatagtatctgtggcaaattgtatatgattaacaagaaaatatatgattctttgtagatgatttcatctgtaaagtcacaatgtttctcagagtcacttagtccaggatgttgcattcccagcacacagtacagttattcttgaaaactacaagtgaaaaagggggaacaattgaggttgtccaaggccacctagaggactgtcttgcactaccttgtgattcaaccatttcattcctagatatataccccagaaaaatgactgctcatagcagctttattcataatagcacaaaattgtaaacagtgaaatttccatccataggaaaatggatagacaaactacaatatagtcagtggaatactgttcatttaaaaaaggactgctgatacatgcaacaacctgtatgaatctcaaaaacattaagttgagcaaaacaaaccaaacataacatactatctaattacttttatattaaagccacttccaggcaaaactaatatttgatgatagataccagaacagtggctgcttagagtgagggcagggaattcaaattgaatggaaaaggggcctgaggaaattttctggggtgattggaatgttttgtattttgatctggatgatggttatgtagctgcatatatttgtcaacattcctcatgctgtatgtttagatttgtgattttactatatgtaaattaattccttaataaaatactattataaaataagctgtaaattaaatggaattaacttcaagtttacattgagtttatatgtttccattgaacaatcactagtgatggttaaatgtggcttatcgacttactcatttcttatatatgttctctatctaaaaagagagctggtgtaagataaatgctaacttttacaaaaggtattattaagtatcctgactacacatcatggtggcagtgttaggcatcttagataaattgagaaattattcttaaaactgacaatagcaactaattaatttgatatagaaacgatctgcctgttttagatacgaatggcatattttaaataacctaggacgatttatttataaattacctgaataattttataaatgcatataaaactatcaaaataaaaagatatattttagagcatcttgattttagaagcgaatcgaacactgtgaatcacagtttcagatataaatcataactatttataatatggataaaaatgaagcacaaatatgatagatacaatcacaacaatataaaatactgaatttgaatgttgtagcttgtgagctttctcaaatctaatgtgtatctttttaaaatttgtttagatgttttttaaacatctcttaactttctttcatctagataaggcatttccttttcttccaataccaagcaagcaaaaaaaaaaaaaaaaaaaaaaaaaaaaaa

SEQ ID NO: 57630 - DNA, 2773 bp, Homo Sapiens
ttcgctcgccgcctcgctcagagccggggccgggccagagcggcgccccgctgccctgtccccgcgtgcagaccccgggcccggccccggccccccgccaagccatgctgtgcggccgctggaggcgttgccgccgcccgcccgaggagcccccggtggccgcccaggtcgcagcccaagtcgcggcgccggtcgctctcccgtccccgccgactccctccgatggcggcaccaagaggcccgggctgcgggcgctgaagaagatgggcctgacggaggacgaggacgtgcgcgccatgctgcggggctcccggctccgcaagatccgctcgcgcacgtggcacaaggagcggctgtaccggctgcaggaggacggcctgagcgtgtggttccagcggcgcatcccgcgtgcgccatcgcagcacatcttcttcgtgcagcacatcgaggcggtccgcgagggccaccagtccgagggcctgcggcgcttcgggggtgccttcgcgccagcgcgctgcctcaccatcgccttcaagggccgccgcaagaacctggacctggcggcgcccacggctgaggaagcgcagcgctgggtgcgcggtctgaccaagctccgcgcgcgcctggacgccatgagccagcgcgagcggctagaccactggatccactcctatctgcaccgggctgactccaaccaggacagcaagatgagcttcaaggagatcaagagcctgctgagaatggtcaacgtggacatgaacgacatgtacgcctacctcctcttcaaggagtgtgaccactccaacaacgaccgtctagagggggctgagatcgaggagttcctgcggcggctgctgaagcggccggagctggaggagatcttccatcagtactcgggcgaggaccgcgtgctgagtgcccctgagctgctggagttcctggaggaccagggcgaggagggcgccacactggcccgcgcccagcagctcattcagacctatgagctcaacgagacagccaagcagcatgagctgatgacactggatggcttcatgatgtacctgttgtcgccggagggggctgccttggacaacacccacacgtgtgtgttccaggacatgaaccagccccttgcccactacttcatctcttcctcccacaacacctatctgactgactcccagatcggggggcccagcagcaccgaggcctatgttagggcctttgcccagggatgccgctgcgtggagctggactgctgggaggggccaggaggggagcccgtcatctatcatggccataccctcacctccaagattctcttccgggacgtggtccaagccgtgcgcgaccatgccttcacgctgtccccttaccctgtcatcctatccctggagaaccactgcgggctggagcagcaggctgccatggcccgccacctctgcaccatcctgggggacatgctggtgacacaggcgctggactccccaaatcccgaggagctgccatccccagagcagctgaagggccgggtcctggtgaagggaaagaagttgcccgctgctcggagcgaggatggccgggctctgtcggatcgggaggaggaggaggaggatgacgaggaggaagaagaggaggtggaggctgcagcgcagaggcggctggccaagcagatctccccggagctgtcggccctggctgtgtactgccacgccacccgcctgcggaccctgcaccctgcccccaacgccccacaaccctgccaggtcagctccctcagcgagcgcaaagccaagaaactcattcgggaggcagggaacagctttgtcaggcacaatgcccgccagctgacccgcgtgtacccgctggggctgcggatgaactcagccaactacagtccccaggagatgtggaactcgggctgtcagctggtggccttgaacttccagacgccaggctacgagatggacctcaatgccgggcgcttcctagtcaatgggcagtgtggctacgtcctaaaacctgcctgcctgcggcaacctgactcgacctttgaccccgagtacccaggacctcccagaaccactctcagcatccaggtgctgactgcacagcagctgcccaagctgaatgccgagaagccacactccattgtggaccccctggtgcgcattgagatccatggggtgcccgcagactgtgcccggcaggagactgactacgtgctcaacaatggcttcaacccccgctgggggcagaccctgcagttccagctgcgggctccggagctggcactggtccggtttgtggtggaagattatgacgccacctcccccaatgactttgtgggccagtttacactgcctcttagcagcctaaagcaagggtaccgccacatacacctgctttccaaggacggggcctcactgtcaccagccacgctcttcatccaaatccgcatccagcgctcctgagtagctgggactacaggcacaggccaccacacctggctaatgtttaaattttatgtagagatggcggggggggcgggggtctccctatgctgcccaggctggtctcgagctcctgacctcaagtgatcctcctgccccagcattccaaagtgctgggattacaggtgtgagccactgcctggcctggccgtaggtttgtaactgtttcatagaagagccctggagaagacagtagaatgagcctatctagtttaaaaaataaagaagcacgttgatttcaaaaaaaaaaaaaaaaaaaa

SEQ ID NO: 57631 - DNA, 1706 bp, Homo Sapiens
aggattaaaattaaataagagacagttttgcttcttaatggtttctccacttaattattttagtaggaatctgaaatcaaatatagaatggaaaactaatgtagccaaaccatctgagagccaatagtagagacagacattaaatcacagcacttgttcactagcagtttgggtacctacagtatgctatattgaatgataattgttaacagctagaaacttgcttataaaatgtggtgatgtttctttatgatagatgcctgaccagtgtcctcttccctcagtaaggtggttctaactcatagttgttcatactaatgggagaagatggtgggagagtcttatcatctgctaacatttcaacatgagacaccacacatgtgtgtcctaagtaggtgatgcattgttgaagtacctgcaggattttcgtatgatctttgcatttataatatctttctggaatgggtcttaaagtcaggtttgagcaggtgcttatagcatgtagtcagattccatggtagaggcaagcattctccctaagaatgttgtttacgttgaagacagcgatggaggatcccacccttctgctctgatgtcttccgaggtagaaggggttgctgacggcttcatcagggcattagagagaatgagcctggtgggtttactgtgatcaaggtcgagttgtgtcacgaaataggattttggacctaagtcttattctttagtttatttaatatatcagtctttttccattatttcctcatttgccttaattgaagattctagagttgcggtgcagttcagaaagcctgaggtttaaggggaaatggtaaagagaaagaggaccggagcaggattcgattcagagccaactggttttcttctttcctatttcaggggagtagcttcttcagcagactctccgctgcttgtgctccacattgcattgctcacaccatggcatggtgtttccattcattgtctcctgagttcatttggtgtagaagagctggttctaaagagaacttctccctgctgtctttttcttccagaacactggggtgatgggtataccgcagcagttgcctggccgtctcctaggttagtgtagcagagattctattctcagataagacttccgtgtcggctgaagatgtaagggactgtccacgtttgagggagaatttcttctcactattctagctagaatatgtgaatgaagaaagatttctattatcctggactcctttgtattttttataattgttttctttttctcacttatgctctgatatgtattggtttcttgaataaattaaaacttaaagcactgctttagtagacatttctggaattcctgtctcccgctttcctcaccacatacagctcttctccactgcctacagctgtatgttttagcatgatgatggatggatggactggagctagagcaaggttaaccacatatgctctggtttcagaaacatcagagagggaggtggtgacatttataagtattcatcttttatttacaaatttcacgcacatttgtagtctactgtaagcaacatagtgtcttctaccatctttttcctcttaagggtcaacactactattctatttcatatttaccatttttttcttttaaaagaattcatgtggtgggtcattgtagaaaatttagagaatatgcaaatattgaaaaa

SEQ ID NO: 57632 - DNA, 1367 bp, Homo Sapiens
ggtgtcatggctgcttgaagtcccgggagtcggtgaggcggctgcaggtccctccctgcggagccgctggtccggctggcggagatgtgaccgcgggcccggccggcctgcctcaggcgtcgcgtcagctcccgtgtccgtgcccttaacccacaccgatggcgggatccggctgcgcctggggcgcggagccgccgcgttttctggaggccttcgggcggctgtggcaggtacagagccgtctgggtagcggctcctccgcctcggtgtatcgggttcgctgctgcggcaaccctggctcgccccccggcgccctcaagcagttcttgccgccaggaaccaccggggctgcggcctctgccgccgagtatggtttccgcaaagagagggcggcgctggaacagttgcagggtcacagaaacatcgtgactttgtatggagtgtttacaatccacttttctccaaatgtgccatcacgctgtctgttgcttgaactcctggatgtcagtgtttcggaattgctcttatattccagtcaccagggttgttccatgtggatgatacagcattgtgcccgagatgttttggaggcccttgcttttcttcatcatgagggctatgtccatgcggacctcaaaccacgtaacatattgtggagtgcagagaatgaatgttttaaactcattgactttggacttagcttcaaagaaggcaatcaggatgtaaagtatattcagacagacgggtatcgggctccagaagcagaattgcaaaattgcttggcccaggctggcctgcagagtgatacagaatgtacctcagctgttgatctgtggagcctaggaatcattttactggaaatgttctcaggaatgaaactgaaacatacagtcagatctcaggaatggaaggcaaacagttctgctactattgatcacatatttgccagtaaagcagtggtgaatgccgcaattccagcctatcacctaagagaccttatcaaaagcatgcttcatgatgatccaagcagaagaattcctgctgaaatggcattgtgcagcccattctttagcattccttttgcccctcatattgaagatctggtcatgcttcccactccagtgctaagactgctgaatgtgctggatgatgattatcttgagaatgaagaggaatatgaaggtctttgttgagtatgcaaatgctggtgattccaaagctgcgcagaaattactgactggaaggatgtttgatgggaagtttgttgtggctacattctacccgctgagtgcctacaagaggggatatctgtatcaaaccttgctttaatcagtaacctaaggactgttaaaaaaaaaaaaaaaaaa

SEQ ID NO: 57633 - DNA, 3624 bp, Homo Sapiens; identical to SEQ ID NO: 23454

SEQ ID NO: 57634 - DNA, 2134 bp, Homo Sapiens
ctttcatactgcctcctcccttgtttttctgtctcagagagatagtctgtcctaaatatcccatgtagcccaggccactgaattaaaacggagcgtattcgttctctgccccaccccgcaactcctgaaagcggcgcaactcaattacttgatccttatatgccccacgcgggactcatactacgtttcccgtgaacacgtgcagtccaaaccccgcccctgatatttatctcagtggacggtggccggaaaaggacaatggtttccatgtcagcggataaacgctctcccctcggctcccggacgcgacggaggtcgtagtagtagtgagtacgtgctgaggagcaaaggagtaaccaagagatccagtgaccgacagagcaagagccatgccgcgccggggcctggtggctgggccagacttggagtattttcagcgtcgctatttcacgccggcggaggtggcccaacataacaggcccgaagacctctgggtatcttacctgggacgcgtgtacgacctaacgtcattggcacaggaatacaaggggaacctgctgctgaaacccatcgtggaagttgcaggccaggatatcagccactggtttgatccaaagaccagagacatccgcaagcacatagatccgctgaccggctgcctgaggtactgcaccccgcggggccgctttgtgcacgttccgcctcagctgccctgttcggactgggccaacgattttgggaagccctggtggcaggggtcgtattatgaggtggggcggctgtctgccaagacccggagcatccgcatcattaacacgctcacgtcgcaggagcacacactggagctacacgtggaaatatgaagggaagaacctgaacatggattttaccctggaagagaatgggatccgggatgaggaggaagaatttgactatctcagtatggacggtacacttcacacacctgcaatacttctgtacttcaatgatgatctcacggagttgtaggcaaggagatgtacactcgtgtagactcaagacgtatttcgagtttggctttttctgtgccttgaggaaaagtggtggggccgaggggtgcctggacccagatctccactcctctccaggagctagcctgtgcccttctgaagtgtaaaggccctattccctgccttcattacagtttgctctgagaaaattagtgaattaatctttgggaatgatacaagaagatcaagtaccttggtttagggagatgtagaagaggatagtcagagttcaggcagaactgtttgatagttaagagagagtagttctacaggggtgagggatggaaggacttttttggcaatgatggaaatgagatgtctgcaggaagatgggatttacaaagaaataggaaatgtttatcattgaccatacaaagctggcttatcttacttgtagaagagtgtttggcagctgaaacccaagggaaagaaaggaagtgcgtcattataggcaattcaggctagatattatactaggtacttcatataccctctttttttttgcccccaacaaagagaaggggtcttgctctgtcacccagtctggagtgcagtggcaaaatcatggctcactgcagcctggagctcctgggcacaagtgatcctcccatctctgccttgagtagctgggacttcaggtgcacgccacaatgcctaattttttaattttttgtagacacagggtctcgctgtgttgcccaggctggtttcaacctcctggcctcaagtgatcctcttgcctcagcctcccaaatagcctcttcaagacaactaccccataaggtggattaccattactatgttacagataagtcctttcactttccacctagctgatcctaaatgttccttcctcagggaggtcttttctgatttcttggtgggtcaagactttctgataaatcagttagcaccatgcattttccagagtttttattacaattgtaaaattatggctgtaataggctggctgcgctgctagattgtaagctcacgagggcagagatcttgttcacatcttgctcactgctatattctcattgctgagcacacagttgcagctcaataaattttgaatgaactcc

SEQ ID NO: 57635 - DNA, 4835 bp, Homo Sapiens
agcacaaagcactggctctggagctttatgaaagcttcaagcggaagccctgagagctctggctgtgaatgcactttattttggacccagaagatcctggggctcctcaggcctcgacagagggaaaaccgaagcacaggcgactccgcggcggggttgtaatggcggcgcctcctgctcgcccagaccacacccggctgctccagatctgccttctcctgggggttctggtggaaatcagggccgaacagattctctactcggtgtttgaggagcaggaagaaggctcagtggtgggcaacatcgccaaggacctggggttggcgccccgggagctggcggagcgcggagtccgcatcgtctccagaggtaggacgcagcttttcgccctgaacccgcgcagcggcaccttggtcaccgcgggtaggatagacagggaggagctctgcgacagatctccaaactgtgtgacaaacctggagattcttctagaagatacagtgaagattttgcgggtagaggtggaaataatcgatgttaatgataacccacccagttttgggacagaacagagggaaataaaagttgctgaaaatgaaaatcctggggcaagatttcctcttcctgaagcttttgatccggatgtaggtgtaaactccctgcagggttaccagctcaactcaaacggttacttttccctggacgtgcaaagtggggccgatgggattaagtacccagagctggtgctggaacgcgctctagatcgcgaggaagaggcggttcaccacctcgttctcacggccttcgatggaggtgacccggttcgctctggcactgccaggattctcataatacttgtggataccaacgataatgctcccgtgttcactcagcccgagtaccacgtaagtgttcgtgagaacgttcctgtaggcactcggctactcaccgtaaaagccactgatccagatgaaggagccaatggagacgtgacgtattctttccggaaagtaagagacaaaatatcacagctatttcagttgaattctctgagtggggatataacaatattggggggtctagattatgaggactctggattctatgacatagatgtagaagcccatgatgggcctggtctccgagctagaagcaaggtactggtgacagttctggatgaaaatgacaacgcaccagaagtcacagttacatctctcaccagctcagtccaggaatcttcttccccgggtacagtaattgcacttttcaacgtgcatgacagtgactcaggaggaaatggcctagtcacatgttctattccagataatctgccattcacacttgaaaagacctatggaaattattatcggttgttgacacacagaacactggacagggaagaagtctcagaatataacatcactgtaactgccactgaccagggaactcctccactgtctacagaaactcatatttcactgcaagtgatggacatcaatgacaacccacccactttccctcatgcttcctactctgcttacattcctgaaaacaaccccagaggagcctccatcttatctatgactgctcaagaccctgacagtggtgacaatgcccgaatcacttactccctggccgaagacaccttccagggtgcacctctgtcctcctatgtctccatcaactccaatacagggatcctatatgctctttgctccttcgactatgagcagtttagagacctgcagctgctgatgacagccagtgacagtggagaccctccactcagcagcaatgtgtcactgagcctctttgtgctggaccagaacgacaatgttcctgagatcctgtaccccaccttccctactgatggctccactggtgtggagctggcaccccgctccgcagattccggctacctggtgaccaaagtggtggcagtggacagagactcaggtcagaatgcctggctgtcctacagcctactcaagtccagcgagccgggactatttgcagtggggctgcacacaggcgaggtgcgcaccgcacgggccctgctggacagagacgcgctcaagcagaggcttgtagtggtcgtccaggaccatggccagccccctctctcggccaccgtcacactcactgtggctgtggccgacagcatcccagatgtcctggctgacttgggcagcctcaagccttcagcagacccagacgactcgggcctcacactctatctcgtggtggcagtggccgctgtctcctgcgtcttcctggcttttgtcacggtgctgctagcactcaagctgagacgctggcacaagtcacgcctgcttcacgctgaaggcagcaggttggcaggtgtgcctgcctcgcactttgtgggcgtggacggggttcgggctttcctgcagacctattcccacgaggtctccctcaccgcggactcgcggaagagtcacctgatcttctcccaacccagctatgcagacacgctcatcagccgggagagttgtgagaaaagcgagcctcttctgataactcaggatttacttgaaacaaaaggagaccctaatcttcaggtgagtcaatcttataatagatcataccacactgaaatatagacaaagagttgtgtaaatgtctctcattttatatgtaatatatcaaataaagttgcctcttttaatattttattgctttaaagaaaactggtggatgaccttccaataatgatcaacagtatttaccacacaaaaatgttgtttattacttatcctttttggtcttcattcagttgtagtttcagccagaattttctaattttacaactctgagccacctcatttccttaaatttccttttctgtgctgggtgtggtggctcacacctgtaatcctaacactttgggagtgtgaggaggacggattgcctgagctcaggagttcgagaccagtctgggcaacatggtgaaacccagtctctactaaaatacaaaaagttagctaggcgtggtggtgtgtgcccgtagtcccagctaccctggaggctgaggcatgagaattgcttgaacctgggaggcagaggttgcaatgagctgagatcatgacactgtactccagcctgggcaacagagcaagcctctgtctccaaaaagtaaaataaaataaagtaaaataaagaataaatttccttttctcttaggtgttcctgaaaagatacaagagacctgtaaaatagaaggcaattgtgtaaattcacatttacaatattctttctcatgaagctattgttggatctggactgagggttttttaatttcctattttcacactctaccatgctttgcttgaagtttacttttccttccttgaaagggtattttccattataacaggcaacgtcaatttaagaatactggcaatttgtgagtttaacttttagatataactttaacaggatattttctcaatgaactggtatatttcaaatattttcttgttgctgttctgagatgcaccagaagtgactatgtgtgattcctctggtgcactcctgtgattatgagaaatatttccaagctaatttcagtcatatataagtagattctaggagtaactttaataatttttaaattgcttatcatgacatcactattgagactttcttgatttccaaggaaaatataagtttttggagtcttttctcttgtcatcatgtgagcctctttcaaaggttgagttacttgggttctggactgatatgatttacgctgcttagtaaggtggcctcatccctattgctacaaattgctttcagatatttctgtcatcatgtggctctgggattattttatatgagggaaaatattttgtgtgtaggggatatacaacacttttgttctttgtgctttcatttaggttctgtgagaattcaaaattcatgaatgcatatgcttacacaaattagtgtaatttgataactggaagttgtagtgatagactgtggaatatgcctcaatttgacttacaaaggagagttttagtttctacatggttttgtattcatagaaagttgtggtgcaatacatagagtaagctggaatatgatatgatgcagttacctggcttggggagcagaaagcagaaataacaagtgaatgttgagagacaacttacatctgaggagagattgtttaaagtaattaagccataaaatataatttggaaatgctcaattggtctgaaactgtgtcaagcatattcaggtgttggcattaggaatatattccagaatgagagtgccacatgttttaaaggcctaggaaagcagtagataatttataacctaaaatcaaattttttaaaaaatgtgtttttgttagaatgggcagtgggtttcttttagcaaataacaattttgattaaacaaattgttgtatattcatattacggactactagataactatattatgggccactagataactataagaaataaataggaaagctctctatgtactgatatgatctttaagatataacaactaaaaaagcaatgtgcagaatatggtatgttgtatgcttacatttgtgtaaagaaggagacagaatatttataaaaatccgttgccctatacaagacatatctccggaaggatacctaagaaactttaacactcatttcccctgtgaaagcatttctcctcatctaaagcagagatgaaaggaagaacctatgctgaatgcatcttttgaatttggaactatatgaatatttcacatattttaaaacaaatgaagactttataaattaaaaaaaaaaaaaaaaaaa

SEQ ID NO: 57636 - DNA, 3376 bp, Homo Sapiens
tctatgacatcgggattcagactaacataagcatgtactttgaactgcaacaaacatggttcacatttatgataatactctgcatcattgaagtgattgtcatcctcatgctgatcttcctcaggaatcgaatccgagtcgccattatcctgctgaaggaaggaagcaaagccattggatatgttcctagtacattagtctatccagctttaactttcattttgctctcaatctgcatttgctactgggtcgtgacagcagttttcttggcgacatcgggggtacctgtatacaaagtcatagctccaggggggcattgtatacatgaaaatcaaacctgtgacccagagatttttaatacaactgaaattgccaaagcttgccctggggctctgtgtaactttgctttctatggtggaaagagcttgtaccatcagtacatccctaccttccatgtatacaacttatttgtctttctctggcttataaacttcgtcattgcattaggtcagtgcgcccttgctggtgcattcgctacttattactgggccatgaaaaaacctgatgacatcccacgatatccactttttactgcatttggacgagccatacgatatcacacaggatccctagcatttggatctttaattattgcattaattcaaatgtttaaaattgtactagaatacttggaccaccgtcttaaacgtacccagaacacattgtctaaattcctacagtgctgcctgagatgctgcttctggtgtttggaaaatgcaataaagtttttaaacagaaatgcctatattatgattgcaatatatggcagaaacttctgcaggtcagcaaaagatgctttcaatctgctgatgagaaatgttttgaaagttgcagttacagatgaagttacatactttgtattattcctggggaaacttctagttgctggaagtataggtgttctggccttcctattcttcacacaaagactgccagtgattgcacaaggaccagcatctttaaattactactgggtacctttgctgacagtcatttttgggtcttacctgattgcacatgggttcttcagcgtctatgcaatgtgtgttgaaacaattttcatctgcttctgtgaagatctggaaataaatgatggatccacagaaaaaccctacttcgtaacccctaacctgcatggaattctgatcaagaagcaactagttccccagaagcagaaagagtagaaaagctccaaacagtgtcactcatttttaagtagaagttgtgtaaattaggttgattgtaatttggaaatgttgcttttgagtaatgtgaaatttctgtgcttaattctaagaagtcagcacctggtactacctgaggtgtcaggtatttgatgacattagctgctgtctactttatagacagtggtcccagctaaagatcaaaatgttaatgtcaaacgttttttaaaatctgtagccgagagtgttttaataacttttataactcagcgtgctgtttccattgcagcactttaatagcctttctttttataagtgtatatttgtaaaggatattcaggcaatttttgaaaacactataaatgtgtaattaattagccataaaatattgatttatagttaaccagcatatggtactaaatttgtaaatatggtgctatggttatatttatactgttcaagctggtggacaactctctaaactgtgattaaacttgtattaatggttccctaggaagtatatttcagtgagtcatgtccataacaaacatagatgttaatgttatataggttctacggagagcattactgggtaaaaaatactatggaaccttcagagcccattctgttttagtgaaatcatgtttatattgaagtcgaatctgagttctggagtgtcatttccaacaacatgaacctctgtccatggtgaaaatattctgaacaaaactgaaattgttacataactcatgccttttgtctttaacccaaatttcttattcccactatatagaaaatcaatatgaatttgtttcagaagagtgattatatcttttcatgagtatacctgtatttctagattaaagagattgtgtggctttgttctacagaaggtttgattttgtctcacctttcagtgaggaaagagaaaagaaagacacttcagattttaccctaaggaaatatactgttggcgctccatcatctaatacctttatgaggggcatactgtgggttaggaactctctctctgcagggcttaggaggaaagttgttgccacctgccaccgctggccgcctgaggtttctgatagtcatgtgtaagttttgaatggcagaacaaagcatgaatcagacacacatcttgcctagccatcccctgtgtgcaaatgtgtatgatgtggttaaccatgtaaaaatgcaccccaaaaggagcattgaatcaatttgtattttcttggcttttaccttaaacttgtatataaggattatttatatattgacagaaaggaacatgttgatctgaatatcactcatatatccaagaaaagagtcagaaatgtattgttgtgttatagattgatctaaatacgtattaattatcttcaagtgtagacacctagatttaaactgagtctgtggcagattaattaatagcaataagccaatgaatagggaagatttttaatatataatgactaccagcttgttcttggcttacattcttgagattattgtattcaaaagtgtcagttggcttcacattttggcaaagagccttctgcattcttattctccttgaagcataatgcagataatgacaacttatctttctagattagtcttttattattcaacaagacaaaggccacaacaaaggactagtagaatagtgacctctacctgagaatttgttataactatagatgtttgtgctctgcccaagagattctgatatactgtgatttgatgtgagccacgatgtgaattattataaagttctctagttgattctgatacacataaaagttgaaaaattggccatgtgtggtgtctcacgcctgtaatcccagcactttgggagtccaagatggacagatcactggagcctaggagttccagaccagtctaggcaacatggtgaaaccccatctatctttataaaaaatataaaagttagccaagtgtggtggtgcacacctgtagtctcagctacttgggaggctgaaatgtgagggtcacttgagcccaagagatcgaggctgcagtgagccatgatcacaccactgcactccagcctgggtgacagagcaaaaccctgtttaaaaaaaaaaagttgaaaaaatcacttg

SEQ ID NO: 57637 - DNA, 1557 bp, Homo Sapiens
caaaaccacacattgtaaaatcaacactattgacagttatgggtaattgaatggcaaatggggtttccaactgggtgctccaactgggactcttaaacaaggcttgacaaattctgctttgtcaggtgtcataaaatatggttcagaacgcatctgtagtgtcaagggaaaatcacttatgccattccctgtattaccacttctgactcttgtccgtcctgaagtaggaattcacatggcttatgatggagtctttgttttaggaaacacgacacaaacgctaagactcttcagatatcatcactgaatctttaagttcaatccagttgctagatttggcctgtaacatttggctcagggattcctggtggccaaaggaaaacatcacaagagtcacattatctgtaagataggaacagactagttgttttaaagaaaacttctcttaaaactcaaagcagaaagatgtcagaatgggatttaagtaatttctgccttcagcctagggaattggcttgtatggcagttttttccgctccttttgtggtatctatatagagataggatatatgactcacttggcaaaggtcaggagtctgaacatttgggtaatgagtaccttgtcctaggaagataaactgagcacagtgtccctaggacttgcacgatcgaagaatccccttggttggggcttggacctttgccagctcatctgcaaaatcttttaagttgtcctgatcagccaaagctgctatcacctgaatcttggttgtttttactattaataatatagaaatattttgccaagaaaatcttttgtctttttgtgggacaggtttcagaaatggtccacagtctctgtagatacctctagtaattggtcgcagaactcattgcctttaatcagccctggggatcagtgggtgacagatcagtgcctttatgaaatggagttactaggaatggtgtgtcattgcctgacgtgcctccttatctgccataatggagttccttatatatttcctgcttgtcttgtatgcctttggatctagtaaggaaataaggagaggttgagaaaatacagagtaaagctttagcaggtatcttcccgttaagtgacaggcagtgatttgtgcttctttggtttttatcatcggtctaatgtgagtcattcttgtgcgtcagggttggatctttttgcctttcccttctcttctcctgttgacttgacctggtttctttagtctgagaaattggacgtatttttctttctttgaggaaagggctagtggataaagccctcccatagagagtgtaacgtgggtaatatttgggtgccctttcagggttaggtcccactttgttcaaggaatgctgtatgcatgggtagattattaataagatggtggccccagtaaatgttggtgtatgtgtgagacttggtgggaagagctgcttgctgtaaatagtggctcctctgctcagcagttttgtgaagtcagttgacttattctttaatttcatcccaccacccaacataaattttttggttcattc

SEQ ID NO: 57638 - DNA, 1550 bp, Homo Sapiens
gtggcagggcgctggcaggtgcaggtctttgtgcattctcagagggctcttggtcgctcagggaggtggagtgtccactgttctgtgtgcctagttttgctctgggcagtgttgctgaaagggccaggttgtggtgggggcggggctgactgctaaggctccaactgcagtgtcgttggtggggcaaggtgggggtgaagtgcactcctgctgcatgagtggcagggcagggtgcacacacacacgtgggtgctggctgggtgaggcaagcaaaacctgcctgcacatggcaaagggatgtgggaagtatccatgggccccaggggaagctgcagtgtggggagggaatgggtggcactgctgcgtgtctgtgggggccaccccactgggggtctccagtggtcaagttccgtctgccagggtagaagctatgatgggggcttctaggacactcgaggctgacctgaaagcaggtactttcacactgggaccctgcaagaggccaacagattaagggatgctcaggtcagactggcctcttcttatgggcaagacctccccgcagagttcagatctgacagttgccctagggttaaagtctcctatgggagcaagttgattctaggtggatggtcatccttggctgtgctccactacagaggcccctgcaccaaaccctgtgggctccagatcagctggcttgctgcccctacaacttctttaagcagctttccctgccaactcaagtgtccctgctggctgaagggtttcctcctgctgagattccagaggcctgtgcccagagcaggttgctctctgccagttcacctaacttgtgccctcagcatattgggggtcaagaacaagtcccagtgtgtggtagccccatgcagcgttcccagattccttctccttaagccaagcttctctctgtcttccctcctctactcttggtgctttccctctgaagatctcttaggagtgcaccagtactctcagtccctccggggcagctcttctacctggctgcgtctagtcagccatcttgccccaacatctacttttataaagtcagtctcttttcacacattgcatcagtttcttcctagataagaaaatgagtgtaaatttggacttgtgggtagtcagaaagattacaagaaaagagcattaattcctatgttgataacatggaaaaccatctcaatgctgaaacttcattgtgggtacagttgtaaagcatgtgaagacaggccaggcgcggcggctcactcctgtaatcccagcactttgggaggccaaggcgggcagatcacttgaggtcaggagttcaagaccagcctggccaacatggtaaaaccccgtctctactaaaaatacaaaaattagccatgcatggtggtgcatgcctgtaatctcagctactcgggaggctgaggcaggaaaatcacttgaacccgggaggcggaggttgcagtgaggtaagatggcaccactacactccagcccgggcgacagagcaagactctgtgtcaaaaaaaaaaaaaaaa

SEQ ID NO: 57639 - DNA, 962 bp, Homo Sapiens
  misc_feature (878)..(878): n is a, c, g, or t
gaattccgcccagacgcaggcttcttctcgggtcttggtcctgcatcctctctctcccagagcctccgttagggggtgggaaaggactttgccataggtcgctgaggccaccatctgctctcttactggccaagggcgtaaaaagatagtcttcccattagctagagagcaaaccccagaaagcctattggttgcgccgtccgcgggccttggtccgctttgaaggcgggctgcggctgcgagaggagggcgggcgggaggctagctgttgtcgtggttgctcggaggcacgtgtgcagtcccggaagcggcgaggggaaactgctccgcgcgcgcccgcgggaggaggaaccgcccggtcctttagggtccgggcccggccgggccatggattcaatgcctgagcccgcgtcccgctgtcttctgcttcttcccttgctgctgctgctgctgctgctgctgccggccccggagctgggcccgagccaggccggagctgaggagaacgactgggttcgcctgcccagcaaatgcgaagtgtgtaaatatgttgctgtggagctgaagtcagcctttgaggaaaccggcaagaccaaggaggtgattggcacgggctatggcatcctggaccagaaggcctctggagtcaaatacaccaagtcggacttgcggttaatcgaagtcactgagaccatttgcaagaggctcctgattatagcctgcacaaggagaggaccggcagcaatcgatttgccaagggcatgtcagagacctttgagacattacacaacctggtacacaaaggggtcaaggtggtgatggacatcccctatgagctgtggaacgagacttctgcagaggtggctgacctcaagaancagtgtgatgtgctggtggaagagtttgaggaggtgatcgaggactggtacaggaaccaccaggaggaagacctgactgaattc

SEQ ID NO: 57640 - DNA, 351 bp, Homo Sapiens
  misc_feature (1)..(2): n is a, c, g, or t
  misc_feature (342)..(342): n is a, c, g, or t
nnattttatatcaataaaataaaatactttctctagttttggagcttctgtatttcctatagttttctgactgtccattttatccatcttagaagtattcacatcccttctatgcaggatttctgcatagttttaaatactttcattgcctaagggtttgggtgtgtcagctttttttgttttaaaaatatttaacactaaaaccttaaaataatgaaggctacttatcagaccactgaggccaagatcctggggtatttaaaaggaaagtctggggtgcttaaggattaaaggggacaggagtattgggtatccccagtttatttgggggggctttaaggntggggaacc

SEQ ID NO: 57641 - DNA, 2830 bp, Homo Sapiens
attgttccctcccagaggatctaagagtattggaagtttccaaccattggtggtactctatgctcatcctacctcctttgctgaaagacagtgtggcagcgcccctgctgtctgcctactaccctgactgtgttggcatgagcccctcctgcaccagcacaaaccgcgccgctgccactggcaatgccagccctgggaagctggagcactccaaggctgccctctccgtgcacgttccaggcatgaaccgatacttccagcctttctaccagcccaatgagtgtggcaaagccctctgtgtgaggccggatgtgatggaactggatgagctctatgagtttccagagtattcccgagaccccaccatgtacctggctttgagaaacctcatcctcgcactgtggtatactaactgcaaagaagctcttactcctcagaaatgtattcctcacatcatcgtccggggtctcgtgcgtattcgatgcgttcaggaagtggagagaatactgtattttatgaccagaaaaggtctcatcaacactggagttctcagcgtgggagccgaccagtatcttctccctaaggactaccacaataaatcagtcatcattatcggggctggtccagcaggattagcagctgctaggcaactgcataactttggaattaaggtgactgtcctggaagccaaagaccgaattggaggccgagtctgggatgataaatcttttaaaggcgtcacagtgggaagaggagctcagattgtcaatgggtgtattaacaacccagtagcattaatgtgtgaacaacttggcatcagcatgcataaatttggagaaagatgtgacttaattcaggaaggtggaagaataactgaccccactattgacaagcgcatggattttcattttaatgctctcttggatgttgtctctgagtggagaaaggataagactcagctccaagatgtccctttaggagaaaagatagaagaaatctacaaggcatttattaaggaatctggtatccaattcagtgagctggagggacaggtgcttcagttccatctcagtaacctggagtacgcctgtggcagcaaccttcaccaggtatctgctcgctcgtgggaccacaatgaattctttgcccagtttgctggtgaccacactctgctaactcccgggtactcggtgataattgaaaaactggcagaagggcttgacattcaactcaaatctccagtgcagtgtattgattattctggagatgaagtgcaggttaccactacagatggcacagggtattctgcacaaaaggtattagtcactgtaccactggctttactacagaaaggtgccattcagtttaatccaccgttgtcagagaagaagatgaaggctatcaacagcttaggcgcaggcatcattgaaaagattgccttgcaatttccgtatagattttgggacagtaaagtacaaggggctgacttttttggtcacgttcctcccagtgccagcaagcgagggctttttgccgtgttctatgacatggatccccagaagaagcacagcgtgctgatgtctgtgattgccggggaggctgtcgcatccgtgaggaccctggacgacaaacaggtgctgcagcagtgcatggccacgctccgggagctgttcaaggagcaggaggtcccagatcccacaaagtattttgtcactcggtggagcacagacccatggatccagatggcatacagttttgtgaagacaggtggaagtggggaggcctacgatatcattgctgaagacattcaaggaaccgtctttttcgctggtgaggcaacaaacaggcatttcccacaaactgttacaggggcatatttgagtggcgttcgagaagcaagcaagattgcagcattttaagaattcggtggacccagctttcttctgtaccccagatggggaaatttgaatcacatgttaaacctcagttttataagagggggaaaaaaccgtctctacatagtaaaactgaaatgtttctaaggcgatatgataatgcaaacctatttcatcactctaaaagcactgacctcaaaaaaccttataagcacttagatttaattgcattttccataggttcaactactgctgaaagtctggatttcagaataaagcagaatgtaagtttcagttgaggccatggatttgattgttccatggctggaagttccctttagatttcacattttatatggctgatcaattttcatacattgagaaaccaagtcaatcaagcaggaatcatttaaaaaccagataaagccatgtttttcttctgtgacaatttatcagtatctttaccaatgagccttaatttttatataggtccaatattgagcttttacttaaaatttagatagaacttttttttggatacagcacaaactccagttgacagtaaaatgaagcttctaggtattttgtattgtacatatttcctcctactgggtgttcaaaagaaatttaaattcaagtaccttttgtgataaaatgttttagttttgtgcacccattggcaaaacaggaaagtttccagataggtattgtatcattgagaatgcagcactctgggaggccaaggcaaaagaatcacttgagcccaggagttcgagaccaccctgggcaacacagtgagacttcatctccacaaaaaaaatttttaaaaattagctgggcatggtggtgcatgcctgtagtcccagctacttgagtggccgaggcaggaggattgcttaagcacaagaggtcaaggcttcacaagaccctgtctc

SEQ ID NO: 57642 - DNA, 1939 bp, Homo Sapiens
ggcacgagggtcgtgtgtctggcgtgtggagctagtgctcccgcttattcgccactgtcgccaccgctgtcatgaaccgcgagagcttcgcggcgggagagcggctggtgtcgccggcttacgtgcggcagggctgtgaggcccgccgctcgcatgagcacctcatacggctgcttctggagaaggttcattcatggcattggacgatccggtgatatttctgctgtgcaaccaaaagctgcaggctctagccttttgaacaaaattaccaattctttggtcctggacattataaagctggctggtgtccatacagtagccaactgctttgtagttcctatggcaactggtatgagtctaactctgtgtttcttaacattacgacacaaaagaccaaaggcaaagtatattatatggccacgaatagaccagaagtcctgctttaaatccatgatcactgcaggttttgagcctgtggtgatagaaaatgttttggaaggtgacgagctgcgtacagacctgaaagcagtggaggctaaagtccaggaacttgggcctgattgcattctgtgtattcattctactacatcctgttttgctccaagggtgcctgatagattagaagaactggctgtgatttgtgctaattatgacattccacatatagttaataatgcttatggagtgcagtcttcaaagtgtatgcatctcattcagcagggggctcgagttggtagaatagatgcttttgttcagagcttggacaaaaattttatggttccagtaggtggtgctataattgctggctttaatgattcattcattcaggaaatcagcaagatgtatccaggaagagcttcagcttcaccttctttagatgtccttattactttattgtcacttggatcaaatggctataagaagctactaaaagaaagaaaggaaatgttttcatatttgtccaaccaaataaagaagttgtcagaagcctacaatgaaagactgttgcatacacctcacaatcccatatctttagctatgacacttaaaacactagatgaacaccgtgacaaagctgtcactcagcttggctcgatgctttttaccagacaggtttctggagccagggttgtgcctcttgggtccatgcaaactgtgagtggctatactttcagaggctttatgtcacatacaaataattacccttgtgcttacctcaatgctgcatcagccatcggaatgaagatgcaggatgtggacctgttcataaagagacttgacaggtgtttaaaggcagtaagaaaagaacgaagtaaagagagtgatgacaattatgacaaaactgaagatgtggatattgaagaaatggctttaaaactagataatgtacttcttgacacataccaggatgcttcttcatgacatgcgaagggtttcttcttgatcatttgaaagaaatgataaggctgtagtacaagcaagcagtttaaagataagacttgataatgtacttcttgacacataccaggatgcttcttcatgacatgcgaagggtttcttcttgatcatttgaaagaaatgataaggctgtagtacaagcaagcagtttaaagataagacttgagatttttgaattgagaatttcatgggaatattcagtcaaggagcagactttggtctgaactagccattgatgattgttaagtttcccattcttagactgcatcaatccttgtgatccttaacaggttataatatacaattagcatttttctaattgttagaatatctgtcaattaagcatcatgactcagataatttttactagtgtaatgacagtaaaattacttcaattctctttgaaaaaaaaaaaaaaaaaaaaaaaaaaaaaaaaaaaaaaaaaaaaaaaaaaaaaaaaaaaaaaaaaaaaaaaaaaaaa

SEQ ID NO: 57643 - DNA, 3258 bp, Homo Sapiens
ctttaaggcaattaggccttgacacattaggaaatattgcagctgagcttttactggaccctgttgatttcaaaactactcatctgatgtttcatactgttacaaaatgtctaatgtcaagggatagatttttaaagatgagaggcatggaaattttgggaaatctttgcaaagcagaagataatggtgttttaatttgtgaatatgtggatcaggattcctacagagagatcatttgtcatctcactttacctgatgtgctgcttgtaatctcaacactcgaggtgctatacatgctcacggaaatgggagatgttgcttgcacaaaaattgcaaaagtagaaaagagcatagacatgttagtgtgtctggtttctatggatattcagatgtttggccctgatgcactagctgcggtaaaactcattgaacacccaagttccagtcatcaaatgttatctgaaattaggccacaagctatagagcaagtccaaacccagactcatgtagcatctgccccaggttagtgttttcacatattctttttcagtgtggttacgagtgtataagatttgatcctaagaataaatttcaatgtgcagtatagagaactgatattttacagtatagtaggccaaagtggaatttggatatgtactctaatttcttagatattatacattccaggagtagcaggatcaaggtgagctcataggaagaatagtataataggaaaattaagttcggcaggatttagagtaatgtgatgaattagatattcataattacgatagctataagtgccccaataggcatattatttgtgattttggtcatgggaaattgacatgccaggaatagattattcatatattaccttatgattttctcaggtgatcatcaggacgcgtaagtataatacttctaatgtccttaagtgttggaaccaacaccacagaatcaacagcctaggagaagacacatgcacatatgtatacacacacttacaagcatgtatacctgcatttatgcacctttcctagtgtctcttagctcaattctgtttagctcaactgtaattatagtacagacatgtctaataaccagacttcagtccttgaactccttccactggctcattatgagtcatcattttttatattttaccacccttaacctttttttggagtgctttctctaccttggtttatactaaaaatacatatttcatctcacctacccttccatttcctatcctctcacctcctgctgtccccaagacacttaatctttctttatattttttgaatggaggatgctcgtgttctcaattgatcttaattctcactttgcaattaatacagaggctgtgtagaatgaatttcttcaatttttttactccttcagttacaaacttattagcatctggactcattttcctttagcttctgctcatttcagaaagagatgctaatttcttctgaaacttactctgaatatcagtctttcccatctccatgttcccatatcttaaatctctttttatttactcactttttcctttcagctagaaatgcgtttaggtctcttatcctccctcgctagccccaaaccaaaaatttcattatccttaatctttagccatcacatccattcatcagatcttgttgagtcttcctaaatacctggccttttcaattgccaatgcttatgaatgagattgaactctcatcatctctagctatctgttctcacgttcattcatggtcccaatttgtcttctactccaacttgtagtatgaaaattatgtactctatgcaaagtatgtaaaagtatcacatatttcattgatttccattatgtccttctgaagtgtatagatttgtgtcatatgttcactcaactaacttggatccacctaacaaaagtggacaaataacagaaggcacaaaatagataattttgactgccagtctattcagtgagctttcaactacaggtaatagatgttaaacagccgatttatattggggaatctttggtcagaatattaatggtttctcaaccttgagaaagaaatgaaactgttcatattgctttaagtgggaggtgggaatgttttttaccatcaaagaagaaactaaagattaaattaattgagggacataaaggagcagtgttagagaaattgataaaatgtcagtgaatactcaagggtgatttgatgaagactattttttgctgcatggttagcctttgaccttcacagttcttttgacctcagcaaatgaacctacttctcaatctaaaatttggtcctcatttggcaaatgaatgaatttaaacattgagaatttgtggcttattcatttatgtagtaattaattcattcatagagatgggactagactgctcaggattgaaaagagttaattttcagctggagagcactttattacttgtgctctccctgaatgacaactttaaattgtttgattggttatcctttgtggtttagctattgcctgcatagtttaatgctgctttttttggaattaccatctttaaactttttgctcacttccctcaatccctctgaaaacttttataaccttttacccatttttaggttaacatctaaatctctatcataatttaaatagttgcaaagtatgtattgtcttgatgtatattaaactacatttttaaaagaaaataattacagtgctttttgtatgcagtggaatcttgataccatcattcattttttaaaatacacaaactctttaacatcagaaattttataatattcctctttcaccttgaacttgtattccagtatcctcacaagagttttatcctaatataatacattttatgtttgagattcttttttattcatcaccctgtcaatactttttagttacaaaatagacatttttaaagtttttcaattccttgttattctttaaagctctaaattttaaaaatttcatttggccaggcactgtggcttacacctataatcccagcactttgggaggctgaggcagaaggatcactggaggccaggagtttgagaccagcctggcaacatagtgagattccatctctacaaaatcaggaaaaaaattagctgagcatggtgatgcatgcgtgtagtcccagcttgggcccagggagtcaaaggctgtagtgagctatgaatgtgtcactggatccaccttaggcagtagagcaagaacctggtctatctc

SEQ ID NO: 57644 - DNA, 1768 bp, Homo Sapiens
gtgcgttcctcgtctgccagccggcttggctagcgcgcggcggccgtggctaaggctgctacgaagcgagcttgggaggagcagcggcctgcggggcagaggagcatcccgtctaccaggtcccaagcggcgtggcccgcgggtcatggccaaaggagaaggcgccgagagcggctccgcggcggggctgctacccaccagcatcctccaaagcactgaacgcccggcccaggtgaaggtgagggcccggcaccccgcgtggagggcgaggggagggaggaggcggaaatgggggatcaggggcgtcccggggtcggcctggtcaggggaccattgggatagccagggacaggaagcctacgagccagagaggacctgggggtgccctgggacagggggtgacggagaaaagctgtgggcgccctcgcccccctttgctcacccgcactccacgctctgcggagaggctctgccggcagccccatgtgattccccgctctgcctagccggtttccattcttccgtgttgagcggctggggcttgccgccccaaaccccagagatgaccccagaaatctgggaaactccccttggttccccatctctcatcccctacctcccactccacccacctactcttgcgcctcaactctgctgttagggccgctcaagttcattcataagaacaagagctctgctcttaaaggagccgcgtccctcaggcatttgtctgaatgtggatgttcgcgcgggaacggtgctttgcgcatcgagaccatcgaccacatccccagccctggggacttattgaaggaccaaataaaatgaggcggccccctaggaaaggatctcaggcaatagataccttcgtgggaggtgactgccttttccttttaattttattaactgatctttggaaggagctgggtgagcaattatgctgttactatgtatgagtaatatctactttccctgggcaacccaacctccctagtgccccacccggagagggatcaggcctgaacctggaggcctttcctcccgtctccaaggtcctctaggagctcaggggtggagggcgatgggtcgggaagctggagagtaggacagttcctgggtccgcctgaagctctggctgcctatagtggtcagggatgctctgggataggtggaacagctgcgcctgcagccagctgggccgggcccccgtagctctctagagctctcaccaggagtaggcaggtggatcctgtctctgaggcagggtgggagcctgggctgggctcaggcagctcttggcagcaagcggattttcaggttgtggcagctggtgccgggtggggacaggtcggctgctggagcatgctccccctgaaacctggaaaggagcagtgcctgaggccttgggaggagttctttagggatggtgggctgataagtttccttagaatctccaggagggaggtggcttaggggctactttcacacaagtatggattccccttttccatgttcctaagaatggagaacacctttcttttgtataaagtgggatctcggagatcgagaccatgctggctaacatggtgaaaccccgtctctacttaaaatacaaaaaattagctgggtgtggtagtgggtgcctgtagtcccagctacttgggaggctgaggcaggagaatggcgtgaacccaggaggcggagcttgcagtgagccgagatggcaccactgcactccagcctgggcaacagagcaagactctgtctc

SEQ ID NO: 57645 - DNA, 7955 bp, Homo Sapiens
atcacttctccctgggctcccaggccctcctgcagcagccccgcctgggccatgtcttcctcagatgaagagacgctcagtgagcggtcatgtcggagtgagcggtcttgtcggagtgagcgatcttacaggagcgagcggtcggggagcctgtctccctgtcccccaggggacaccttgccctggaacctgccactgcatgagcagaaaaagcggaaaagccaggattcggtgctggaccctgcagagcgtgctgtggtcagagtcgctgatgaacgggaccgggttcagaagaaaacgttcaccaagtgggtcaacaagcacttaatgaaggtccgcaagcacatcaatgatctttatgaagatctgcgggatggccataacctgatctctctgttggaggtcctctcaggcatcaaactgccccgggagaagggcaggatgcgttttcataggctgcagaatgtgcagattgccctggacttcctaaagcagcgacaggtgaaactagtgaatattcgcaatgatgacatcacagatggcaaccccaagttgaccctgggtctgatctggaccattattttgcatttccagatctctgacatctacattagtggagaatcaggggatatgtcagccaaggagaaactactcctgtggacccagaaggtgacagctggttacacaggaatcaaatgcaccaacttttcctcctgctggagtgatgggaagatgttcaatgcactcattcaccgataccgacccgatctagtagacatggagagggtgcaaatccaaagtaaccgagagaatctggaacaagcttttgaagtggcagaaagactgggggtcactcgcctgctggatgcagaagatgtggatgtgccatctccagatgaaaagtctgtaatcacttatgtgtcttcgatttatgatgccttccctaaagttcctgagggtggagaagggatcagtgctacggaagtggactccaggtggcaagaataccaaagccgagtggactccctcattccctggatcaaacagcatacaatactgatgtcagataaaacttttccccaaaaccctgttgaactaaaggcactttataaccaatatatacacttcaaagaaacagaaattctggccaaggagagagaaaaaggaagaattgaggaattatataaattactagaggtgtggattgaatttggccgaattaaactgcctcaaggttatcaccctaatgatgtggaagaagagtggggaaagctcatcatagagatgctggaacgagagaaatcacttcggccggctgtggagaggctggaattgctgctacagattgcaaacaaaatccagaatggtgctttgaactgtgaagaaaaactgacactagctaagaatacactgcaggctgatgctgctcacctggaatcaggacaaccggtacaatgtgagtcagatgtcattatgtacattcaagagtgtgaaggtctcatcaggcagctgcaggtggatctccagatcctgcgggatgagaattactaccagctagaagagctggcttttagggtcatgcgtcttcaggatgagctggtcaccttgcgtctagagtgtacaaacctgtaccggaagggtcatttcacttcacttgaattggttccaccctctactttaaccaccactcatctgaaagcagaacccttaaccaaggcaacccattcttcttctacctcctggttccgaaagcctatgactcgggctgaacttgggccatcagctcctctgaagatgaaggcaatctccgatttgtgtatgaactactgtctttgggtagaagagatgcagatgaaactggagcgagcagagtggggcaatgacctgcctagtgtggagttgcagctagaaacacagcagcacatccatacgagtgtagaagagctgggctcaagtgtcaaggaggccaggttgtatgagggaaagatgtcccagaatttccataccagctatgctgaaactcttggaaagctggagacacagtattgtaaattgaaggaaacttctagcttccggatgaggcaccttcagagcctgcataaatttgtttccagagctacagctgagttgatctggttgaatgagaaggaggaggaggaactagcatatgactggagtgacaacaattccaatatctcagccaagagaaattacttctctgagttgacaatggaactggaggagaaacaggatgtgtttcgttctctacaagatacagcagaactactttcacttgagaaccacccagccaagcagacagtggaggcttacagtgctgctgtccagtcccagttgcagtggatgaagcagctgtgcctgtgtgttgagcagcatgtgaaagagaatactgcttattttcagttcttcagtgatgcacgagagctggagtcattcttgaggaacctccaagattccattaaacgaaaatattcctgtgaccacaacaccagcttatcccgccttgaagacctgctccaggactccatggatgaaaaggagcagcttatacagtccaagagttccgttgccagtctcgttgggagatcaaaaaccatcgttcagctaaaaccacgcagtccagaccatgtgttaaagaacaccatttctgtcaaggctgtctgtgactacaggcagatcgagattactatttgcaaaaatgatgaatgtgtgctagaagataattctcagcggaccaaatggaaagtgatcagccccacagggaacgaggcaatggtgccgtcagtctgcttcctcatccccccacccaataaggatgccattgagatggccagcagggtcgaacaatcttatcagaaggttatggccctttggcatcagctgcatgttaacaccaaaagccttatctcttggaactatctgcgtaaagaccttgaccttgtacagacctggaacctagaaaagcttcgatcctcagcaccaggggagtgccatcagattatgaagaaccttcaggcccactatgaagactttctgcaggatagtcgtgactctgtgctgttctcagtggctgatcgcttgcgcttggaagaggaggtggaagcttgtaaagcccgcttccagcacctgatgaagtccatggagaatgaggacaaagaggagactgtggccaagatgtacatttcagagttgaagaacatccggctacgcctggaggagtatgaacagagggtggtcaaacgaattcagtctctagccagctctaggactgacagagatgcctggcaggacaatgcattaaggattgcagagcaagagcacacccaggaggatttacagcaattgaggtcagacttggatgcagtttctatgaaatgtgacagctttctccatcagtctccatctagttcaagtgtcccaactctgcgctcagaactgaatctgctggtggagaagatggaccatgtctatggtctctctactgtatatctgaataagttaaagacagttgatgttatagtacgtagcatacaggatgctgaactcttggtcaaaggttatgagattaagctgagtcaagaagaagtagtactggcagatctctcagctctggaggcccattggtcgacattacggcactggcttagtgatgtgaaggacaagaattcagtgttttcagtcctggatgaggaaattgccaaggccaaggtagtggcagagcagatgagtcgtctgacaccagagcgaaatctggatttggagcgctatcaggaaaaaggctcccagctgcaggagcgttggcaccgagtcattgcccagctcgagattcgccaatctgagctagaaagtatccaggaagttctgggagattaccgagcctgccatggaactctcatcaagtggattgaggaaaccactgcccagcaggaaatgatgaagccaggccaggcagaggatagcagagtgctttcggagcagctcagccagcagacggccctatttgcagaaattgagagaaatcagacaaaactggatcaatgtcaaaaattttcccagcagtactctactattgtaaaggactatgaattgcaactgatgacatacaaggcctttgtggaatcgcagcagaaatcccctggcaagcgccgtcgcatgctttcctcttcagatgccatcactcaagagttcatggacttaaggactcgctacacggcattggtgactttaacaactcagcacgtgaaatacatcagtgatgcactccggcgtctggaggaggaggagaaagtggtagaagaggagaaacaagaacatgtggagaaggttaaagaacttttgggctgggtgtctaccctagcgaggaatacacaaggaaaagctacctcatccgagaccaaagaatcaacagacattgaaaaagctattttggaacagcaggttctgtcagaagagctgacaacaaagaaagaacaagtctctgaagctattaaaacatcacagatcttcttggccaagcatggtcataagctctcagaaaaagagaagaaacaaatatctgagcaattgaatgccctaaacaaggcttaccatgacctttgtgatggttctgcaaatcagcttcagcagcttcagagccagttggctcaccagacagaacaaaagaccctgcagaaacaacaaaatacctgtcaccagcaactggaggatctttgcagttgggtaggacaggcagaaagagcactggcaggccaccaaggcagaaccacccagcaggatctctctgctttgcagaagaaccaaagtgacttgaaggatttacaggatgacattcagaatcgtgccacctcatttgccactgttgtcaaggacattgaggggttcatggaagagaatcagaccaagctgagcccacgtgagttgacagctcttcgggaaaagcttcatcaggctaaggagcaatatgaggcgctccaggaagagacacgtgtggcccagaaggaactggaggaagcagtgacctccgccttacagcaggagactgaaaagagtaaagcagcaaaggaactggcagagaacaagaagaagatcgatgctctcctggattgggtaacttcagtaggatcatctggtggacagctgctgaccaaccttccaggaatggagcagctctcgggagctagcttggagaaaggagccttggacaccactgatggttacatgggggtgaatcaagccccagagaaactggacaagcaatgtgagatgatgaaggcccgtcaccaagaattgctgtcccagcagcaaaatttcattctggccacccagtcagctcaggccttcttggatcagcatggccacaatctcacacctgaggagcaacagatgctgcaacagaagctgggagagctaaaggaacaatactctacttccctggcccaatcagaggcagaactgaagcaggtgcagacacttcaggatgagttgcagaaatttctgcaggatcataaagagtttgaaagctggttggaacgatccgagaaagagctggagaacatgcataagggaggcagcagccccgagacccttccctccctgctaaagcggcaaggaagcttctcagaggatgtcatttcccacaaaggagacttgagatttgtgactatctcaggacagaaagtcttggacatggaaaacagttttaaggaaggcaaagaaccatcagaaattggaaacttagtaaaggacaagttgaaggatgcaacagaaagatacactgctctccactcaaagtgtacacgattaggatctcacctgaatatgctgttaggccagtatcatcaattccaaaacagtgctgacagcctgcaggcctggatgcaggcttgtgaggccaacgtggagaagctcctctcagatactgttgcctctgaccctggagttctccaggagcagcttgcaacaacaaagcagttgcaggaggaattggctgagcaccaagtacctgtggaaaaactccaaaaagtagctcgtgacataatggaaattgaaggggagccagccccagaccacaggcatgttcaagaaactacagattccatactcagccacttccaaagcctctcctatagcctggctgagcgatcttctctgctgcagaaagcaattgcccaatctcagagtgtccaggaaagcctggagagcctgttgcagtctattggggaagttgaacaaaacctggaagggaagcaggtgtcatcactctcatcaggagtcatccaggaagccttagccacaaatatgaaattgaagcaggacattgctcggcaaaagagcagcttggaggccacccgtgagatggtgacccgattcatggagacagcagacagtactacagcagcagtgctgcagggcaaactggcagaggtgagccagcggttcgaacagctctgtctacagcagcaagaaaaggagagctccctaaagaagcttctaccccaggcagagatgtttgaacacctctctggtaagctgcagcagttcatggaaaacaaaagtcggatgctggcctctggaaatcagccagatcaagatattacacatttcttccaacagatccaggagctcaatttggaaatggaagaccaacaggagaacctagatactcttgagcacctggtcactgaactgagctcttgtggctttgcgctggacttgtgccagcatcaggacagggtacagaatctaagaaaagacttcacagagctacagaagacagttaaagagagagagaaagatgcatcatcttgccaggaacagttggatgaattccggaagctggtcaggaccttccagaaatggttgaaagaaactgaagggagtattccacctacggaaacttctatgagtgctaaagagttagaaaagcagattgaacacctgaagagtctactagatgactgggcaagtaagggaactctggtggaagaaatcaattgcaaaggtacttctttagaaaatctcatcatggaaatcacagcacctgattcccaaggcaagacaggtgagtacaggctcttcaaaatatagtgaataaaaattgctctttgcttttggcctttggagatgcctccttatataattaaagtgaaaatcaaggttggatatgaaaacaaagggcatgcccaaagcagtcttcccctgcaacctgacctgtcaccccttttgctatataacattgctccattttgcaaaattccttcccatgatggaaaaagtaaatgaactagttgtcccacttagaactatcaaatgaacactgaataattaaaatgagattttcatcttgagaatttcccttttttgaatgtgtaaatgggatgggtaagcatcatctttaaacttgggcactggccagccacgaagtcagaagatcaaaaccagcctggccaacatggtgaaaccccatctctactaaaaatacaaaaattaggccaggtgcggcagctcacacctgtaatcccagcactttgggaggccaaggcaggcggatcacgaagtcaggagattgagaccatcctggctaacacggtgaaaccccgtctctactaaaaatacaaaaaattggccaggcgtggtggcgggtgcctgtagtcccagctactcgggaggctgaggcaggagaatggtgcggagcttgcagtgagccgagatcacgccactgcactccaacttgggcaacagacagagcgagactctgtctcaaaaaaaaaaaaaaatacaaacattagccgggcatggtggcacgcacctatagtcccagctactcgggagtctgaaacaggagaatagcttgaacctggtaggtggaggtttcattgagccacgacagtgcatgcactccagcctgggcaacagacagagtgagactccatctcagg

SEQ ID NO: 57646 - DNA, 909 bp, Homo Sapiens
atgtctcctgcagctgctgctgagccagatggggaccagcaggacagacacgtcagcaaactcatcttctgcttctttgtcttcggcgccgtcttgttgtgtgtgggagtcctgctctccatctttgggttccaggcatgccaatataagcccctcccagactgccccatggtgctcaaggtggcggggcctgcatgtgccgtggttgggcttggggctgtgatcctggcccgctcccgggcgcaacttcagctcggtgcagggctgcagagaggtcagcagatggaccccgaccgagccttcatctgtggagagagccgccagtttgcccagtgccttatctttgggtttctgttcttgacaagcggcatgctcatcagcgtcctgggcatttgggtccctggatgtggctccaaatgggcgcaggaaccgctaaacgagacagacactggcgactcagagccccggatgtgtgggttcctttctctgcagatcatggggcccttgattgtgcttgtgggattgtgtttcttcgtggttgcccatgttaagaagagaaacacgctgaatgctggccaggatgcctctgagagagaagagggacagatccagattatggagcctgtccaggtcactgtaggtgggttgctgttatttgcgttctgcttctatcacagtggctttgcagcagggtttcaccagctgctcttggttctcgtctggattctctttctcaattcttccatctctcacacatgtgtgtgcacacgcacacacccccatcatgtgtacatacacaatggtgctgctgtgggaagccccgtaggaaccttgtatacatcttttcccccccagcaactctttcctactttgcaaagcattgggatattaagtagtgaccttgactga

SEQ ID NO: 57647 - DNA, 306 bp, Homo Sapiens
atggacccccgtctgcccgcctgggcgctggtgctgctgggccctgccctggtgttcgcgttgggccccgcgcccaccccagagatgcgtgagaagttgtgcggccaccacttcgtacgcgcgctggtgcgcgtgtgcgggggcccccgctggtccaccgaagccaggaggcctgcggccggaggcgacctgccccagacctctcaccatcaccgccaccaccgtgcagctgccaccaaccctgcacgctactgctgcctcagtggctgtacccaacaagacctgctgaccctctgtccctactga

SEQ ID NO: 57648 - DNA, 3121 bp, Homo Sapiens
cggctcggcgttgactccgccgcacgctgcagccgcggctggaagatggcggggaacgactgcggcgcgctgctggacgaagagctctcctccttcttcctcaactatctcgctgacacgcagggtggagggtccggggaggagcaactctatgctgactttccagaactcgacctctcccagctggatgccagcgactttgactcggccacctgctttggggagctgcagtggtgcccagagaactcagagactgaacccaaccagtacagccccgatgactccgagctcttccagattgacagtgagaatgaggccctcctggcagagctcaccaagaccctggatgacatccctgaagatgacgtgggtctggctgccttcccagccctggatggtggagacgctctatcatgcacctcagcttcgcctgccccctcatctgcaccccccagccctgccccggagaagccctcggccccagcccctgaggtggacgagctctcactgctgcagaagctcctcctggccacatcctacccaacatcaagctctgacacccagaaggaagggaccgcctggcgccaggcaggcctcagatctaaaagtcaacggccttgtgttaaggcggacagcacccaagacaagaaggctcccatgatgcagtctcagagccgaagttgtacagaactacataagcacctcacctcggcacagtgctgcctgcaggatcggggtctgcagccaccatgcctccagagtccccggctccctgccaaggaggacaaggagccgggtgaggactgcccgagcccccagccagctccagcctctccccgggactccctagctctgggcagggcagaccccggtgccccggtttcccaggaagacatgcaggcgatggtgcaactcatacgctacatgcacacctactgcctcccccagaggaagctgcccccacagacccctgagccactccccaaggcctgcagcaacccctcccagcaggtcagatcccggccctggtcccggcaccactccaaagcctcctgggctgagttctccattctgagggaacttctggctcaagacgtgctctgtgatgtcagcaaaccctaccgtctggccacgcctgtttatgcctccctcacacctcggtcaaggcccaggccccccaaagacagtcaggcctcccctggtcgcccgtcctcggtggaggaggtaaggatcgcagcttcacccaagagcaccgggcccagaccaagcctgcgcccactgcggctggaggtgaaaagggaggtccgccggcctgccagactgcagcagcaggaggaggaagacgaggaagaagaggaggaggaagaggaagaagaaaaagaggaggaggaggagtggggcaggaaaaggccaggccgaggcctgccatggacgaagctggggaggaagctggagagctctgtgtgccccgtgcggcgttctcggagactgaaccctgagctgggcccctggctgacatttgcagatgagccgctggtcccctcggagccccaaggtgctctgccctcactgtgcctggctcccaaggcctacgacgtagagcgggagctgggcagccccacggacgaggacagtggccaagaccagcagctcctacggggaccccagatccctgccctggagagcccctgtgagagtgggtgtggggacatggatgaggaccccagctgcccgcagctccctcccagagactctcccaggtgcctcatgctggccttgtcacaaagcgacccaacttttggcaagaagagctttgagcagaccttgacagtggagctctgtggcacagcaggactcaccccacccaccacaccaccgtacaagcccacagaggaggatcccttcaaaccagacatcaagcatagtctaggcaaagaaatagctctcagcctcccctcccctgagggcctctcactcaaggccaccccaggggctgcccacaagctgccaaagaagcacccagagcgaagtgagctcctgtcccacctgcgacatgccacagcccagccagcctcccaggctggccagaagcgtcccttctcctgttcctttggagaccatgactactgccaggtgctccgaccagaaggcgtcctgcaaaggaaggtgctgaggtcctgggagccgtctggggttcaccttgaggactggccccagcagggtgccccttgggctgaggcacaggcccctggcagggaggaagacagaagctgtgatgctggcgccccacccaaggacagcacgctgctgagagaccatgagatccgtgccagcctcaccaaacactttgggctgctggagaccgccctggaggaggaagacctggcctcctgcaagagccctgagtatgacactgtctttgaagacagcagcagcagcagcggcgagagcagcttcctcccagaggaggaagaggaagaaggggaggaggaggaggaggacgatgaagaagaggactcaggggtcagccccacttgctctgaccactgcccctaccagagcccaccaagcaaggccaaccggcagctctgttcccgcagccgctcaagctctggctcttcaccctgccactcctggtcaccagccactcgaaggaacttcagatgtgagagcagagggccgtgttcagacagaacgccaagcatccggcacgccaggaagcggcgggaaaaggccattggggaaggccgcgtggtgtacattcaaaatctctccagcgacatgagctcccgagagctgaagaggcgctttgaagtgtttggtgagattgaggagtgcgaggtgctgacaagaaataggagaggcgagaagtacggcttcatcacctaccggtgttctgagcacgcggccctctctttgacaaagggcgctgccctgaggaagcgcaacgagccctccttccagctgagctacggagggctccggcacttctgctggcccagatacactgactacgattccaattcagaagaggcccttcctgcgtcagggaaaagcaagtatgaagccatggattttgacagcttactgaaagaggcccagcagagcctgcattgataac

SEQ ID NO: 57649 - DNA, 1023 bp, Homo Sapiens; identical to SEQ ID NO: 26412

SEQ ID NO: 57650 - DNA, 1602 bp, Homo Sapiens
tctattgtgcggctgcaggaggtgtcgagcggcgttatttttttttgcggtttgcctttttttttctttttttttttttggaaccgcggttgtttaaaagcctgagggaacctggaggggggctcccactctctaccttctttcctccgagtttgtgactccgagatggacaaagtgtgtgctgtttttggaggctcccgaggcattggcagagctgtggcccagttaatggcccggaaaggctaccgactggcggtcattgccagaaacctggaaggggccaaagccgccgccggtgacctcggcggagatcatttggcatttagctgtgatgttgctaaagaacatgatgttcaaaatacatttgaagagatggagaaacatttaggtcgagtaaatttcttggtaaatgcagctggtattaacagggatggtcttctagtaagaacaaaaactgaagatatggtatctcagcttcatactaacctcttgggttccatgctgacctgtaaagctgccatgaggactatgattcaacaacagggagggtctattgttaatgtaggaagcattgttggcttaaaaggcaactctggccagtccgtttacagtgccagtaaaggaggattagttggattttcacgtgctcttgctaaagaggtagcaagaaagaaaattagagtgaatgtagttgcaccaggttagtgaaaactttattaaaataacttgattatgattattgttttatagggaagccattatttggaacattagtaattgacatctgggtagaatagtttgtaaaatgattgtgaaaagaatcaaataatgaactgggggactcaaaaaaattttttgtacctcatactctatataaagtctatgtgttagcctgtttgcattgctctaaaggactgtctgaggtaattcataaaaaaaagaggcttatttggctctcgggcctgcaggctgtacaagcatgacaccaacatctgctcagcttctggtgaggcccaggaaactttttttcagtcatggcggaaggtaaagaggtagcagccaagtcatatggggatagcaggagcaagagagagaggaggtggcaggctctaaacaaccagctctggcatgaactaacagtgagaactcattatttaccatgtggagggcaccaagctattcatgaggaatccgcctccatgacccaaacacctcccgctaggcccacctccaacattgggaatcacatttcaacatgagatttggaggggacaaacatccaaaccataagagtctttatttttaaattttgcactagtggaataacttaaggtggagagggtcttagaaataattttttccagtcatttttgtagattagaaaactgtacctgggattcagagtgacttgcctaagattacacagctagtttatggaagaactgttactaaaagctttgtcttttgatttccacctaatgggagcttaaaaataatgtcctaccaggtatggtagctcatgtgggaggctgaggcaggagtattgtgaggccaggagttccagatcagcctgagcaacatagcaagatgctgtctgtaccg

SEQ ID NO: 57651 - DNA, 2476 bp, Homo Sapiens
gtgcgatcgggttgtgcttagcttggggtctcctggccccttgacgcgtcaggttgctgtacccctgcatcggatgcgctgtaccctgcgctggctccgtgaaccttagggacaacaccgggacacccgcgaggccggaaaatggactcagtggcttttgaggatgtgtctgtgagcttcagccaggaggagtgggctctgctggctccttcacagaagaaactctacagagatgtgatgcaggaaacattcaagaacctggcatctataggggaaaaatgggaagacccgaatgttgaagatcaacacaaaaaccaaggacgaaatctaagaagccatacgggagagagactctgtgaaggtaaagaaggtagtcaatgtgcagaaaacttcagtcccaatctcagtgtgacgaagaagactgccggagtaaaaccatatgagtgtactatctgtggaaaagccttcatgcgtctctcatcccttactagacacatgaggtctcacactggatacgagctatttgagaagccatataaatgtaaggagtgtgagaaagcctttagttatctcaaatcctttcaaagacatgaaaggagtcacactggagaaaaaccctataaatgtaaacaatgtggaaaaaccttcatatatcaccagccctttcaaagtcatgagcggactcacattggagaaaaaccctatgaatgtaagcaatgtggaaaagctcttagttgttccagttcgcttcgagttcatgaaaggattcacactggagaaaagccctatgaatgtaaacaatgtgggaaagccttcagttgttccagttctattcgagtacacgaaagaactcacactggagagaaaccctatgcatgtaaggaatgtgggaaagccttcatttcccacacaagtgttctaacacacatgataacacacaacggagatagaccttataaatgcaaagaatgtggaaaggcattcatttttcccagttttttacgagtacatgaaagaattcacactggagagaaaccctataaatgtaaacaatgtggtaaagccttcagatgttccacctccattcaaattcatgaaagaattcatactggagagaagccctataaatgtaaagaatgtgggaaatctttcagtgcacgcccagcctttcgagtacacgtgagagtgcatactggagagaaaccctataagtgtaaagaatgtgggaaagcctttagtagaatcagttactttcgaatacatgaaaggactcacactggagagaaaccctacgaatgtaaaaaatgtgggaaaactttcaattatcctctagatttgaaaatccacaagagaaatcacactggagaaaaaccctatgagtgtaaggaatgtgcaaaaaccttcatttctcttgagaactttcgaagacacatgatcacccacactggagacggaccttataaatgtagggactgtgggaaggtgttcatttttcctagtgcgttacgaacacatgaaagaactcacactggagagaaaccctatgaatgtaaacaatgtggaaaagcctttagttgttctagttacattcggatacataaaagaactcacactggggagaaaccttatgaatgtaaggaatgcgggaaggcctttatttatcccacaagctttcaaggacacatgagaatgcatactggagagaaaccctataaatgtaaagaatgtgggaaggcctttagtcttcacagttcctttcaaagacatacaagaattcacaattatgagaaacctcttgaatgtaagcaatgtggaaaagccttcagtgtgtccacatccttaaaaaaacatatgagaatgcacaatcgatagaaactctataaatgtgagaaataggagaaagttttcaattctaacagatgctttcaaagttgtgaaaattcccactgaagagagaaatcctgtcaatgtaagtaatatagaaagcgagatacaagatgattcatgtatagtcaggtaccacataatcatgtttcagtcagcaatgggccatataggttggtagccccataagattatataacacctaaaacatttctatcaaccgcaatttagtagcagtagtaacaccatagtgcagcacattatttaagtgtttatggtgctggtgtaaacgtgctgcactttcagttgtataaaagtacaagacagcggccggggacggtggctcacgcctgtaatcccagcactttgggaggccaaggcgggcggatcacgaggccaggagatcaagaccatcctggctaacacggtaaaaccccatctctactaaaaatacaaaaaattagccgggcgtggtggtgggcgcctgtagtcccagctacttgggaggctgaggcaggagaatggcataaacccaggaggccgagctgacaaagtgagctgagatccggccaacagagcgagactctgtctc

SEQ ID NO: 57652 - DNA, 1773 bp, Homo Sapiens; identical to SEQ ID NO: 23818

SEQ ID NO: 57653 - DNA, 3401 bp, Homo Sapiens
agcgggggcgggacttccgccgtcctcctggtggtggtcgttttggttctgtgtggtgtttcaccaacttcggcctatggctctgtctgacgtcaccgaagtgacggaacggaaaagcgcgagaagcggctcggttcccaccacggagaggcgggagtgagtcaactgacaagcgctggggacagtggcgtccttgtcttgcctttgtcgctcccgccccgctcttccctggctgggctggcggaggccttgctgatgaacctgactgagggccgtgtggtctttgaggacgtggccatatatttctcccaggaggagtgggggcaccttgatgaggctcagagattgctgtaccgtgatgtgatgctggagaatttggcccttttgtcctcactaggttcttggcatggagctgaggatgaggagtcaccttcacagcaaggtttttctgtaggagtgtcagaggttacaacttcaaagccctgtctgtccagccagaaggtccaccctagtgagacatgtggcccacccttgaaagacattctgtgcctggttgagcacaatggaattcatcctgagcaacacatatatatttgtgaggcagagctttttcagcacccaaagcagcaaattggagaaaatctttccagaggggatgattggataccttcatttgggaagaaccacagagttcacatggcagaggagatcttcacatgcatggagggctggaaggacttaccagccacctcatgccttctccagcaccagggccctcaaagcgagtggaagccatacagggacacagaggacagagaagcctttcagactggacaaaatgattacaaatgtagtgaatgtgggaaaaccttcacctgcagctattcatttgttgagcaccagaaaatccacacaggagaaaggtcttatgaatgtaacaaatgtgggaaattctttaagtacagtgccaatttcatgaaacatcagacagttcacactagtgaaaggacttatgagtgcagagaatgtggaaaatcctttatgtacaactaccgactcatgagacataagcgagttcacactggagaaaggccttatgagtgcaacacatgtgggaaattctttcggtacagctccacatttgttagacatcagagagttcacaccggagaaaggccgtatgagtgcagggaatgtgggaaattctttatggacagctccacactcattaaacatcagagagttcacaccggagaaagaccttataagtgcaatgattgtgggaaattttttaggtatatctccacactcattagacatcagagaattcacactggagaaaggccttatgagtgcagtgtatgtggggaattgtttaggtacaactccagccttgttaaacattggagaaatcacactggagaaaggccttataaatgcagtgaatgtgggaaatcatttaggtaccactgcaggctcattagacaccagagagtccacacgggagaaaggccttatgagtgcagcgaatgcgggaaattctttcgttacaactccaacctcattaaacattggagaaatcacactggagaaaggccttacgagtgcagagagtgtgggaaagcctttagccacaagcatatacttgttgagcaccagaaaatccacagtggagaaagaccttatgagtgcagcgaatgccagaaggcctttattagaaagtctcacctggttcatcaccagaaaatccacagtgaagagaggcttgtgtgctccatgaatgtggggaattctttagctaaaactccaacctcattaaacatcagagatttcacaatggagaaagtttaccattgactattgtaattgggtagtaatgttatataaattccacatttttatgcaactaatctccagaacatttttcctcttaccaagaagtaaaatgctgtacccattaacaacaactcattccccttccctacttccccagaaatgtctcaactatatttctatactctatggtacttatatgaggtaccaatagatatctatgaatttgatatatatttgtacctcatataagtggattctacagtatttatcttttgagactggcttatttcacttaggataaggtcttcacggttcacccatgttgtataatgtgtcagaatatccttcctttttaggtgaaataatattctatggtatttatataccacatttatttatccattcatctgttagtggatacttgggctacttccaccttttgcctattgaaataatgctgctatgaagatgagtgtacaagtgtctattcaagattctactttcaattcttatagggtatatactcagaaatggtggtgctggatcatataggatttctattttttttttttgtttgtttttgagacagagtcttgctctgtcacccaggctggagtgcagtgctgtgatcttggctcactgcaagctccgcctcccaggttcatgccattctcctgcctcaccctcccgagtagctgggactacaggtgcctgccaccacgcctggctaatttttttgtatttttagtagagacggggtttcaccgtgttagccaggatggtcctgatctcctgaccttgtgatctgcctgccttggcctctcaaagtgctgggattacgggcgtgagccaccgcgcctggccaggatttctatttttaatatttttgggaaaatttttccatagtacctgtgccattttacattcccaccagcagtgcacaaggattgcaatctatatacatcctcaccaacattgttcattttctatttctgtttttggggttttttgtagtgccttttgttttggatagcagctatcttgttggatgtgaggtggaatctatagtgtctttcatttttattttgtgaatgattaatgatgttgaggatcttttcatgtgcttgttaggcatttgtgtatctggaaaaatattcaagtcttttttttccatttttaatgggactatttgctttttgttgttgagttgtagttctttatacattctggatattaactccttaccaaatatatgctttttacatattacctcccagtccataggttgctttttcgctctgttgattgtgtcctttgatgaaattttaagttttgatgtactgttgactctttctgtctgtgggttctgtattcatggatcgaagcaaccatggatcaaaagtatttggagcatccatggattgcagtgatcattaatcaaaaatatttggaaaacaaaaagggtagttgcatctgtactaaacatgaacagacattttttcttgtcattattccctaaactatatagtataataaatatttacatagcaaaaaaaaaaaaaaaa

SEQ ID NO: 57654 - DNA, 2323 bp, Homo Sapiens
tcaatgaatgtgtgacatttatattcaatcgatatgcaaaaaattacaggtcagcaggcataaaaaatttggctatggagttttggttacacgagtggcatcaacagcagcaggtggcattgcactaaaaaagtcagggtttattaatgaacttataactgaattatggtccaatctggaatatggaagagatgatgttagggtaacccatcctagaactactccagtggatcctattgaccgaagctgtcaaaagtcttttttagcactggtgaacttgttatcctatcctgctatttatgagcttgtaaggaatcaagatcttcctaataaaacagaatattctcttcgtgaagtcccaacatgtgttattgatattattgatagacttataattttgaattctgaagctaagattcgttctttattcaactatgaacaatcacatatctttggtctaaggttattaagtgtgatatgctgtgatctggacactcttctcctgttagaggctcagtatcaggtatctgaaatgttactaaatgctcaagaagaaaatatcttggagatttctgagagccacagggactttataattgatggcttatcagtggagagaaatcatgttcttgttagaataaatcttgttggtgggccattggaacggattttgcctccgaggttactcgaaaagagtgataatccatatccttggccaatgttttcatcatatccattgccaaactgctatctgtcagacattacaagaaatgctggtataaaacaagacaatgatcttgacaagcttttattatgcctcaaaatatctgataaacaaactgaatggatagaaaactgccaaagacaattttgcaaaatgatgaaagccaaacctgatataatcagtggagaggccttaatagaattacttgaaaaatttgtgcttcatctcactgaaagcccatctgaatgctacttcccttcagtggagtatacagctactgatgcaaatgtgaagaatgaaagtctttcatctgtgcagcagcttggcattaaaatgactgtcaggtatggcaaattcctcagtctcttaaaagatggtgcagaaaatgatcttacctgggttttaaagcattgtgagagattcctgaaacagcagcaaacttccataaaatcttctcttctctgcctgcaagggaattatgctggccatgactggtttgtatcttctctgttcatgataatgttgggagacaaagaaaaaacattccaatttcttcatcaattctccaggcttctgacttctgcttttctttggttgccaaggctacatatttctagttaccttcctaatgacactgtagaatctggcatccatccagtatatttttgcagcacccattatattgaaatgctactgaaggctgagttgcctcttgtgttttcagcttttcacatgtctggttttgcaccatcacagatttgcctgcaatggataacccagtgtttttggaattacttagattggatagaaatctgccattatattgctacttgtgttttccttggtcctgattatcaagtgtatatctgtatagctgtattcaaacatttacagcaagacattctacagcacactcagactcaagatctgcaagttttcctaaaagaagaagcactgcatgggtttcgagtgagtgattattttgaatacatggaaattttggaacaaaactaccgaacagtgctgctgagagacatgcggaacattagactgcagagcacatagatcatgagacacacggtttaaatttaggttttatttatttttaaacacagcaggggggcttgatgtttttctgtgtctgtaacaacatttactttgtgaatatacatattgtaaatactgagaagtataacgatatatttaagtaggtatgagctcaatttgtgaattcatttttgtaaatttgttgttttgtaaggttattgtagaatcagatctagcttacttttagttcttattcatgtttaagagttagtcctggccaggcgcggtggctcatgcctgtaatcccagcactttgggagtctgaggtgggcggatcacgaggtcaagagatcgagaccatcctggccaaaatggtgaaacctcgtctctgctaacaatactgaaattagctgggtgcagtgatgcgcctgtagtccctgctacttgggaggctgaggcaggagaatcgcttgaacccgggaggcggaggttgcagtgagccaagattgtgccactgtactccagccaggccacagagtgagactctgtctc

SEQ ID NO: 57655 - DNA, 2625 bp, Homo Sapiens
aaagagaaccggccgccgagacgccgcagggtgccaggcggggagggggcgagaggccccaggcccgagggcatggagcggttaggagagaaagccagtcgcctgctggagaagttcggccgcagaaagggtgaatctagccggtctgggtctgacgggacccccgggccgggcaaggggcgcctaagtgggttggggggacctaggaagtcagggccccgaggagctactgggggacctggggatgagccgttggagccggcccgggagcaaggttccctggacgctgagcgaaatcagcgcggctcctttgaggcgccgcgctacgaaggctcttttcccgcggggccgccgcccacccgggccttgcctctacctcagtcgttgccccccgattttcggctggagcccacggccccggccctcagcccccgctctagcttcgccagtagctcggccagcgacgcgagcaagccgtccagcccccggggcagcctgctgctggacggggcgggggctggcggagctggaggtagccggccctgcagcaatcgcaccagcggcatcagcatgggctacgaccagcgccacgggagccccttgccagcggggccgtgcctgtttggcccacccctggccggagcaccggcaggctattctcccggaggggtcccgtccgcctacccggagctccacgccgccctggaccgattgtacgctcagcggcccgcggggttcggctgccaggaaagccgccactcgtatcccccggccctgggcagccctggagctctagccggggccggagtgggagcggcggggcccttggagagacggggggcgcaacccggacgacactctgtgaccggctacggggactgcgccgtgggcgcccggtaccaggacgagctaacagctttgcttcgcctgacggtgggcaccggtgggcgagaagccggagcccgcggagaaccctcggggattgagccgtcgggtctggaggagccaccaggtcctttcgttccggaggccgcccgggcccggatgcgggagccagaggccagggaggactacttcggcacctgtatcaagtgcaacaaaggcatctatgggcagagcaatgcctgccaggccctggacagcctctaccacacccagtgctttgtttgctgctcttgtgggcgaactttgcgttgcaaggctttctacagtgtcaatggctctgtgtactgtgaggaagattatctgttttcagggtttcaggaggcagctgagaaatgctgtgtctgtggtcacttgattttggagaagatcctacaagcaatggggaagtcctatcatccaggctgtttccgatgcattgtttgcaacaagtgcctggatggcatccccttcacagtggacttctccaaccaagtatactgtgtcaccgactaccacaaaaattatgctcctaagtgtgcagcctgtggccaacccatcctcccctctgagggctgtgaggacatcgtgagggtgatatccatggaccgggattatcactttgagtgctaccactgtgaggactgccggatgcagctgagtgatgaggaaggctgctgctgtttccctctggatgggcacttgctctgccatggttgccacatgcagcggctcaatgcccgacaaccccctgccaactatatctgagctgcaatcactgctgctgctgtcaccctgcagacaaactgctgtggccagtgggcccctctgaggccagccaaggcaaagaatgcactctgcaggcctggcagaagagtcctctggggaggaccccaagggccggagacccaaagatcatgatattccaaatggattgtggaagagaaaccttatatttaccagggtgggggcgactggcctttttcccatgtgtgcagtctgagcttaggcacacacaggagggttccaggactttctgaacatctgattctgtatcttcagtatatatattttgtttgttttagagatgggatctcaccatgttgcccaggctagtcttgaactcctgggctcgaatgatcctcccaccttggcctcccaaggtgctgggattataggcgtaagccactgtgtctggcctagtgtatgattatgcatgagtcacgcaatgttctggtcctggattccaggagtagaggacctagctttaaatcaattagtttcagtttgcttgaaactagttcacctaaagctagatctcttaaaaccaatttactgaaaacttgtttgcttaaagttaatgacttaatgactaatttgccaaaagctcaattcctattttggtgtgtttatatccatttaggtgtcctattcttttttgtcatgctttggatatttcaaggatttatatctattcatccaagagtacttctgagctattatcagcaacataaatttatcaaatttgcagcactttgtaaatgatgagattgcttcctacctttatggatgtctttttctatgttatctaccattcaaaaacttttttaaaaagtttaaagtttctagcaataaatacaattggtacagaaaaaaaaaaaaaaaaaaaaaaaaaaaaaaaaaaaaaaaaaaaaaaacctcggg

SEQ ID NO: 57656 - DNA, 1871 bp, Homo Sapiens
tggaaaaaataatctgtcaaatgtggaaaatggacatctctcaagaaaaagatcctcttctgattcatgggaacctacttcaggctctaagcagaataaattccctgaaaaaagaaaaaggaactctgtggactcagatctgaaaagcacaagagaatctatgataccaaaagcaagagagtccttccttgagaagcgtcctgatggaccacatcagaaagaaaaatttataaaacatattgcactgaagacacctggtgatgtgttgcgcttagaagatatatccaaggaaccgagtgatgaaactgatggctcttctgcaggcttggcaccttcaaattctggcaattctggccaccattctaccaggaatagtgaccaaatccaagtggcaggtaccaaggagactaagatgcagaaaccccacttacctttatctcaggaaaagtctgcaattaaaaaagctagcaaccttcagaaaaataaaaccgctagctccacgacaaaggagaaggagacaaaactacctttactttcccgtgttccaagtgctggttcctctctagtaccattaaatgctaaaaattgtgctcttccagtttctaaaaaagataaagagcgttcctcatctaaagaatgttctgggcattctacagaatccaccaaacacaaggaacacaaagcaaagactaataaggccgattctaatgtatcttcagggaaaatttctgggggacctttgcgctcagaatatggcactcctacaaagtctccccctgctgctttggaagttgtgccatgtatcccaagccctgcagcaccttcagataaagccccttcagaaggagagagttcaggaaattccaatgcaggtagcagtgcactgaaaagaaaactaaggggtgattttgatagtgatgaagaaagtttaggttacaacctagacagtgatgaggaagaggaaacattaaagtcactggaagaaataatggctttgaacttcaatcagactcctgcagctacaggaaagcctcctgctctttccaaggggcttagatctcagtcatcagactatacaggacatgttcatcctggaacttacacaaataccttagaacgtctagtgaaggaaatggaagacacacaaaggtttgttagcataaagattaatttgctaaatttaacattttgcttgtttgtgtggcttacttttaatttaccttttttaaaaaatcatgagaaattagcgtgcattttggactctgttgtcaactgtgttagaataagatatgttggccggacgcagtggctcatgcctgtaatcacaacactttgggagacccaggcaagattacttgagcccaggagttcaaggctgcggtgagtcgtgatggcgccacttcactgcagcctgggtggcagagtgagacccagtctcaaatgaaaaaaagaggccaggtgtgatggctcatgcctgtaatccagtactttaggaggccaaagcaggcaaatctcttgagcccaggagtttgagactagcctgggcaacatggtgaaaccccatctctacaaaaaatacaaaaattagccagtcatggtgccacatacctatggtcccagctactcaacaggctgaggttgggaggatcacctgagcccaaggaggtcaaggctgtagtgagctgtgattgagccactgcactccaatctgggtgacagaataagaccccgtctcaaaaaaaaaaaagtggggggccaggcgcagtggctcacgcctgtaatcccagcactttgggaggccgaggcaggtggatcatgaggtcaggagatcgagaccatgctggctaacatggtgaaaccccatctctact

SEQ ID NO: 57657 - DNA, 3155 bp, Homo Sapiens; identical to SEQ ID NO: 24871

SEQ ID NO: 57658 - DNA, 2369 bp, Homo Sapiens
cacgccctcggggtcggtcctcgaggacgcgcagggccccccacccaccaggacgcacgtttcaagctcatcagtaaaggttccttaaattccctaagggcaagaagttaaccaagtaaaacagcatcggaacaccaggatcccatgacagattctgttgtcacgtctccttacagagtttgagcggtgctgaactgtcagcaccatctgtccggtcccagcatgccttctgagaccccccaggcagaagtggggcccacaggctgcccccaccgctcagggccacactcggcgaaggggagcctggagaaggggtccccagaggataaggaagccaaggagcccctgtggatccggcccgatgctccgagcaggtgcacctggcagctgggccggcctgcctccgagtccccacatcaccacactgccccggcaaaatctccaaaaatcttgccagatattctgaagaaaatcggggacacccctatggtcagaatcaacaagattgggaagaagttcggcctgaagtgtgagctcttggccaagtgtgagttcttcaacgcgggcgggagcgtgaaggaccgcatcagcctgcggatgattgaggatgctgagcgcgacgggacgctgaagcccggggacacgattatcgagccgacatccgggaacaccgggatcgggctggccctggctgcggcagtgaggggctatcgctgcatcatcgtgatgccagagaagatgagctccgagaaggtggacgtgctgcgggcactgggggctgagattgtgaggacgcccaccaatgccaggttcgactccccggagtcacacgtgggggtggcctggcggctgaagaacgaaatccccaattctcacatcctagaccagtaccgcaacgccagcaaccccctggctcactatgacaccaccgctgatgagatcctgcagcagtgtgatgggaagctggacatgctggtggcttcagtgggcacgggcggcaccatcacgggcattgccaggaagctgaaggagaagtgtcctggatgcaggatcattggggtggatcccgaagggtccatcctcgcagagccggaggagctgaaccagacggagcagacaacctacgaggtggaagggatcggctacgacttcatccccacggtgctggacaggacggtggtggacaagtggttcaagagcaacgatgaggaggcgttcacctttgcccgcatgctgatcgcgcaagaggggctgctgtgcggtggcagtgctggcagcacggtggcggtggccgtgaaggccgcgcaggagctgcaggagggccagcgctgcgtggtcattctgcccgactcagtgcggaactacatgaccaagttcctgagcgacaggtggatgctgcagaagggctttctgaaggaggaggacctcacggagaagaagccctggtggtggcacctccgtgttcaggagctgggcctgtcagccccgctgaccgtgctcccgaccatcacctgtgggcacaccatcgagatcctccgggagaagggcttcgaccaggcgcccgtggtggatgaggcgggggtaatcctgggaatggtgacgcttgggaacatgctctcgtccctgcttgccgggaaggtgcagccgtcagaccaagttggcaaagtcatctacaagcagttcaaacagatccgcctcacggacacgctgggcaggctctcgcacatcctggagatggaccacttcgccctggtggtgcacgagcagatccagtaccacagcaccgggaagtccagtcagcggcagatggtgttcggggtggtcaccgccattgacttgctgaacttcgtggccgcccaggagcgggaccagaagtgaagtccggagcgctgggcggatgtttcaccaaggaaatattgagagagaagtcggccaggtaggatgaacacaggcaatgactgcgcagagtggattaaaggcaaaagagagaagagtccaggaaggggcggggagaagcctgggtggctcagcatcctccacgggctgcgccgtctgctcggggctgagctggcgggagcagtttgcgtgtttgggttttttaattgagatgaaattcaaataacctaaaaatcaatcacttgaaagtgaacaatcagcggcatttagtacatccagaaagttgtgtaggcaccacctctgtcacgttccggaacattctgtcatcaccctgtgaagcaatcatttcccctcccgtcttcctcctcccctggcaactgctgatcgactttgtgtctctgttgtctaaaataggttttccctgttctggacatttcatataaatggaatcacacaaaaaaaaaaaaaaaaaa

SEQ ID NO: 57659 - DNA, 821 bp, Homo Sapiens
tattaaaaacatgaccacaagccaacacttttaattccactgcagcactgctgggttatttcttgctttccaaattcccttgtctgtagctatctttcatcacttgcaaaaatagcacgtgctcaatcctagattaaaatataagctactctcagaattgataactcataccactctttttaaaaatcaactaaccagaattcagtttttattcacagttcttatctttagctcagggcgtaatataaaagcactaggtttaaaacttacttggtcagcagcaatccacttctaggtacatgtccaaaggaactgaagaaagcatctcaatgtgtgaatgcctacctgtgttcattgcagcattattcagaagagccaagaggtggaagcaaagtaaatgtccattgacagatgaattggtaaacaaaatgcattatatacatacaatgcaatatcatttagccttaaaaacaaaattctgccatatgctacaacatggacgttatgctaagtgaaataaaccagttccgaaaggacaaatacacccatttccacttatatggggtatctaacgtcaaactcagaagaacaaagtactgcggtatttgccacaagctggtggaggagaaaatgagttgttcaatgggtattgagtgtcagccacgcaagatggaaaagctttttgagatttgttgtataaaaatatgcctatagttaacaatactcttcggtacacacaaagtatgtgaaagggtaaattttatgtgtttttatcacaataaaaattgtaataaaaaaaaaaaaaaaaaaaaaaaaaaaaa

SEQ ID NO: 57660 - DNA, 1946 bp, Homo Sapiens
tggccgcctctgctcctcccgaccgcagcccctacctctctcccagactccagtcgcccgtgcccaccgctgcccacgtggcctctttccaggcagcagccagggcttctggcacgtcgggcgccagcactgtcgcttgtggccacggcccgcagagcttcagtcccttgagctcctcctccagagcagggccgagggtctcgccccagcccgactggctgtgcctgcagatgatgctggtcacgcagcttttcgtttcccggaacgcaggtgggatagcagtgcccttttctggcagtgcggcattctctctggcagtcattccgcccggagaggctcatcttgggcggttctgggcgacagctgtgtggctgcacagtggccagtgagaggcatctgggaaggtggcccttgtgtagggagtcactctccttccgtcacggtcacacctcatgaaatggttagattcttccaagtgccttctacgcccctggcagattttctagaatttgccgtcccagaagcttgagaagtgtccagtgccacccgacagcagaagccgggatgccgctgagacgccagcgcttctgagtccctctcactgcctgccttctggtggagagaaggctgtcctgcgggcttatgccctccccacgctcctcgcaccgttcacgccattgtgcagcacagctgttaggaccaaattcatcttccccgcaaggacgagtcaggcccagtgttgcactggtcctgctgtctggcttctgctgcggaacttcctcaccttccaggcagggcccaggagccacaggagcgtgggcggggcagggtctgccctctgtgcttccgactcgccgcttgtgagctggagggacagtcacctcgacctggtgggctgggtgggcctggctgtgctgtgggctgtgcctcactcctgcaagtgggcactcagcggggttggggtcacgaggctgaggtcggcttaaagcaggagtgggcagttggcacgtcatgtttctcctgcatcagggctgtggcaggaatgccgggtgactaccgtagacacttgtcaaggctgaggttcagagaaaggtgtggggtatcccggaggtcaccacagtgtgccaggaggttcaggttggccttccagagcccggcctgtgtgaaatccccacgagcacagaggacagaacgaaacatggtgttgttttgagacagggtgttactgtgtcacccaggctggagtagagtggtgccacattttttgtagagacggggtgtccctgtgtagcccaggctggtcttgaactcctgggtacaagcagtcctccctcgtgggcctcccaaagtgctgggattacaggcgtgggctcccgtgaccagcctggaacgtgctgatgagcctctttttctcctgaaaccccggtgggaacagatggtggatgcttccaaaagcatcgaagctgtccatgaggacatccgcgtgctctctgaggacgccatccgcactgccacagagaagccgctgggggagctatggaagtgacccaaggctgccactggagacgcctctccctgcagtcccccgagaggtgggagactcgcggaaggccctgtccccagcggagtccagaccccacaacttcaggagctctttcccggcagcagagatctgcaggctgcctcttctgccccggagctggggtgcactggggacccccgtggtggggaccttggcagtgtggacatgagcagagcgatggagcagtctcctgccctctcccctgtcctgatggcactctgttgtattttcttactgaagttcagtgataactctgagcagtttcattgtgatcactgtaaatggtaatcagttggaattctcctaaatgtcttccagacactagtaaaaaacgacctgaaaattgaaaaaaaaaaaaaaaaaa

SEQ ID NO: 57661 - DNA, 985 bp, Homo Sapiens
cactcgcccggctcgcccgctttcgcacccagttcacgcgccacagctatgtgtccccgagccgcgcgggcgcccgcgacgctactcctcgccctgggcgcggtgctgtggcctgcggctggcgcctgggagcttacgattttgcacaccaacgacgtgcacagccggctggagcagaccagcgaggactccagcaagtgcgtcaacgccagccgctgcatgggtggcgtggctcggctcttcaccaaggttcagcagatccgccgcgccgaacccaacgtgctgctgctggacgccggcgaccagtaccagggcactatctggttcaccgtgtacaagggcgccgaggtggcgcacttcatgaacgccctgcgctacgatgccatggcactgggaaatcatgaatttgataatggtgtggaaggactgatcgagccactcctcaaagaggccaaatttccaattctgagtgcaaacattaaagcaaaggggccactagcatctcaaatatcaggactttatttgccatataaagttcttcctgttggtgatgaagttgtgggaatcgttggatacacttccaaagaaaccccttttctctcaaatccagggacaaatttagtgtttgaagatgaaatcactgcattacaacctgaagtagataagttaaaaactctaaatgtgaacaaaattattgcactgggacattcgggttttgaaatggataaactcatcgctcagaaagtgaggggtgtggacgtcgtggtgggaggacactccaacacatttctttacacaggtaattgtttcaaaaggattgcatgggccaggatgtccagataagcactgtgtctcttttgcctttgtaactgttattactctttttactgctatttaatatgtaatgtatattatatgatctataatatatatgtaatatacattaaatgggaacatgtgcaaatcttacaaaaaaaaaaaaaaa

SEQ ID NO: 57662 - DNA, 3422 bp, Homo Sapiens
agcgtgtgtgctctttctctgtgatcagaagtagatatctgcaatcagaaccctgatatttggaggaagtggctattattgtccaccctggctgcagcaagctgacccagaaatgtggggttgtgtctccacagctgcctgccatggagtgggtggggatgggtagctgctacttcactgaaggctgaaatccaccaatgctaactgcaatttaccactcagaatttcccctagaagctacaagtgttcagatggactcatgtgctcccaaaataatcactttaggaactttctgccgatgtaattattatctaggtggagaggtggattcctgggccactctatccatgtctttgatttttcctgctttcttgaagatttcttcaactttatcttccagctctactattaaatgttgtgaatgtttttatctctgctgtcatatttttatttccaagtgcattatctgattctttcttccttttttctaattggttttgtttcataggtgaaatattttttctctgagcatgttaattatagtgtctttctgtgttattctgctccctgcattatccctgtttcctttgagttgttttcacctgttttctgtctctcacactggaggctttcctgaagcctctgatgatctttgactatttatatttaagagcagggctctaaaaagctgattggaaggtgttttaggtacttcagcaccatccaacagtaatataatgtgagccacatacataatttcaaattttctagtagccacttttagaaaataaaacaggtaaaattaaaaatgtattttacttcacccaatatatccataatattatttcatcatgtaatcaatgtaaaaaagtattgagacattttgttttttgcactatttttgaaatctggtatgtaatgtgttaatctacacacaaaattttcatttgtaatacataactcacatttagatttataaaacgtagagttgataagtagattcacatagttcttccaaacatactttgttgttgttctaaatatacttaattttccaataactgaatcaagtatccagtttttgtttttttttttttttttttttttgagatggagtctcactctgttgcccaggctggagtgcagtggcgcaatcttggtccactgcaacctccgcctcctgggttccagcaattctcctgcttcagcctccccagtagctgagattactggtgcacactgccacgcctggctaattattttagtagaggcggggtttcactgtgttgcccaggctgttctccaactcctaagcccaggcaatctgcctgtctcggcctcccaaagtgccgggattacaggtgtgaaccgccacacacaaccccaatttttgtttaaaatttgcatccacattaacaaaacttttattagaaaaattcatttaatatctaggcaaaattatatcactttcaaaactttttaagtaaattcagtaacatatcaattcagtttattagcatcaaatttgatgaagcagtgcataaatggaaacaaaacagtttatcaatacaatatatcattcttcagattttgcttattttttgcagccatttattacatttaaaattttgtgcatattgtctcatttgaaaaatgtgagttattctgttttatttgtattatgaaatgtttctattgtaaataaattcttttacctgtctagccaggtcacaagtttttcccattttaggagcttcaaatttagcttgttcatatgcagcgtgatattagggagaaaatgtgaatcacagtgctactttttgtctttgattgaatatttggtaagcatttcttttgtttcaaggaaatcttgaattggattttctagtacaggaaatccttataaaattcttttgtaagtcatccaggtaacattggtaaagaaacaagatcattagatacattgtctttttttttcagaagtttcataaactgtcaacattctatagcttttgtgcatatgtactgaagaattataacacatgtatccgtgactcgtttcttggagtctgcttcagaaaattgaacacaaatattttcagtatgtatcatgcaatagaatagagcaatgagggaaaagttatcctcttgctttaaaattccaacatggatggtcttttgacttaacttagctggagttccatccttgtgatagaaactaacttttctgtctctaactgaaattctttgacagatggaagattgtcaaaaatatctgccatgagtttgagcctttaggcaatgaattcacatttcattgcctttacatgaatcgacattgtaaatttggaggttctttgagacagaatatacccagagttttctttgggcagtgtcttgtatcaaacagttcatctaaggctaaagaaaaatacttgaaatttttcaagatttgaattaattggtctttattattaaaatataaatattctattagcaaaaatatattctgttcatgtatatccaagagcaaaattgtttaatggtttcattgacgttttcagttttcatgaatgtcttttaaggtcttttcctcataattttctaaatacgataaagtgataatttcttcatctctccatctaaggttctttgtagatgcatgtgtaagaagctattttatagcttgcaaggtttacaaactcagacccttttaaaagttgtttaaattgttttgttagaaatttcactcgcagttcatatgagtaattttgtgtattcttttttgacttacactcactaaatggttgctaaaaattcatgtcttaaatattgtcttaagtattatctactatgtatctttaacacttttgaatagaacaaacagcttttccattttgctctgctgcagtaaattgcaattgccattcatcattaaatgtgcactatactgtctctagtcttcttgactatgccagttgtagtaccagcttctgtatctgcactgaattctgcctcagtaatatgcctttgtttaaaatttaaatattttttcatttttttaacctagaaaataattataatgaaaatattaagtatctcattttaggattctgatttacataggtatcactgtaacttgtgctgtttgcataggtatactctatcttgtgctatctgcataaaatatccaagtaaacacattgtgattttacatccgtgcatagaaaaaaaaatcatctgaactcaaatcaatctgttgatactgactagattggtgacgtgtttatgtgtaacactagtgataatgcacgttcctgtacaagcattataatacaacagtgtcctatgcaatgcagtggttaaagtgaattgtagttctatcaaaataaagatacgtttagtggaaaaaaaaaaaaaaa

SEQ ID NO: 57663 - DNA, 2039 bp, Homo Sapiens
ggcacgaggccccgagactgcatcattccgcaccggctgctgcagggccagagggagcaggtggagcgagagagcgagagagcgagccgcgagccggagcgcgccagacccagggcgagactgcagtgacgcggcccgggagacatggcggacgggcgtctctgaataagcagaatccggagcccctcgctacccgcggccgccgcagcccgggccatgccgcacggctgctgaccgcacgcaggggccggccccgaggacacatgcggcggcctttgccgcctcgcccctgaccctctgccctgttctccatgttgcatttctcgtcagtttctcgggcggtgtagctgccgctgccaccagagccggcggggcatcgcgctgctcattcatccggccgcactttcttttccgtttccacccatcccttcccatttccttctccctttccccgccagcttcgcatccatctcccccaccccgtaaccccctcctgcctccatccaccggggctatggccgcagaagaggtattgcagacggtggaccattataagactgagatagagaggctaaccaaggagctcacggagaccacccacgagaagatccaggctgccgagtacgggctggtggtgctggaggagaagctgaccctcaaacagcagtatgatgaactggaggctgagtacgacagcctcaaacaggagctggagcagctcaaagaggtgagttgcctgtcacctctccctttcctggccctcactccccccacccgcaaggcccactcatcatgatcaagaagtcataaaggaggtgattgaaaggactgttttttcttctagggccctttgttggtaagagaagattgaaagagtccattgtttcctcccccaagagaaaaattgcctaagaaatgaatatataagctggaatttgggaggcaatggctgtttggcctgcgggggagggagattagtaagagtcatcaagtctcagcactctaagacgacattcaagtgggttggaatgtataaatcaaacttctcaaaaccgctgttatctcaaacccaggtttcagcgacaatttcgtagtccacaaaagtgatgaggtttgtgcctgaggacccacaatttcaggatttagactgtgtggcacctcagctttcctctggatgtaaccactccttggtgagagagggaactcctcaccaatcccatttgacaaaggctaggcaatcttcattctgcttggctttagtcattcttgtcattgggctgcagaagaaaaacaactttgctgggtgatcccactgccttgatttcacctcggagcgaggctgggccatgtccaagtcttatgaggtcaccctgactagaaaaaattgaactcacctacaaatagtctgaaagagtggtgtatatcaaatacgtgggtagtgttgcatttcaaatgaggctcttctggttgaaatgatatatttataagaccagaatatcacaaatgggtgatgtataatgtctctttagttttttggtatttggcctcttttaaagcctgtcggatgtatgggagaaaacaatgaacgtgctttgatttcctatcagtcactcttaagaacatacatattgtttaagtaactcggtcttttttatctgattcttgagacactatgggtagcaagtaaccacttacaaatttaaatgtaatatacactccttttctgtgtgtcaagtccttatttttaggtgcatattgacatttaaatgttaattattgtttggcatataatatcaaaaatctattatttattttatgctgttacagttaaaagatgtgatttatgacatactgaatcaacttgccttccaatttagtgtgtaatatggtaagcatttatacttttagatatgtcttatttttatttggatgcctgtctaccaaaaaataaatgtactacctatgattaaaaatcccaaaaaaaaaaaaaaaaaaaaaaaaaaaaaaaaaaaaaaaaaaaaaaaaaaaaaaaaaaaaaa

SEQ ID NO: 57664 - DNA, 1444 bp, Homo Sapiens; identical to SEQ ID NO: 25910

SEQ ID NO: 57665 - DNA, 2711 bp, Homo Sapiens; identical to SEQ ID NO: 27074

SEQ ID NO: 57666 - DNA, 1155 bp, Homo Sapiens
gtttttccgctgcaggggtgctgaaggggggacgcgggtcggacgcgtccggctgtggaagagagcggcggccgctcacaacatgcacagcctggcgacggctgcgcctgtgcctactacactggcacaagtggatagagaaaagatctatcagtggatcaatgagctgtccagtcctgagactagggaaaatgctttgctggagctaagtaagaagcgagaatctgttcctgaccttgcacccatgctgtggcattcatttggtactattgcagcacttttacaggaaattgtaaatatttatccatctatcaacccacccaccttgacagcacaccagtctaacagagtttgcaatgctctggcattactgcaatgtgtagcatcacatccagaaaccaggtcagcgtttctcgcagcacacatcccactttttttgtacccctttttgcacactgtcagcaaaacacgtccctttgagtatctccggctcaccagccttggagttactggggccctggtgaaaacagatgaacaagaagtaatcaactttttattaacaacagaaattatccctttatgtttgcgaattatggaatctggaagtgaactttctaaaacagttgccacattcatcctccagaagatcttgttagatgacactggtttggcttatatatgtcagacgtatgagcgtttctcccatgttgccatgatcttgggtaagatggtcctgcagctatccaaagagccttctgcccgtctgctgaagcatgtagtgagatgttaccttcgactttcagataaccccaggttttcagatttgactttctgctggtcatcttttcaaagaaaatgaaacgtttaaaagttcatctgataatactgctaccatagttttgttttcactgctcatctcttattaaggtttttaaccataaaactgaagcaatttctgtaaagacacaaattgataacttagtatagaattaaaattcattaagttatcataagtttgatgttatccttgttaatgtactgatttttgaattattttatttgccataatccatatatttctaacatgagtattttgacagtatttaataaatcagaaagctgtctaaaaaaaaaaaaaaaaaaaaaaaaaaaaaa

SEQ ID NO: 57667 - DNA, 3157 bp, Homo Sapiens
cgccgagggcggcgggctgccgcgcaagggtggcgcgcgcgcgttttccttgttcctggtcaacaaagaaatgtggagtgtcttggctgaatcctcatacagacaagatcattatggtgctgttaggtaggacttgtatccagatgtaaggttgaaaaagtgatataataaaggaaccaaggagaaaattcagaaggaaagaaaaaattggtctcactctgtcaccgaggctggagtacagtggtgcaatcacagctcacggcagcttcaaactcctgggctcaagcgatcctcctgcctcaccctcccgagtagctgagactacagcctctgcaggtgtgcgagcaggattgcttctgcaacaaaagcctccacccagccacatcttgggaaaagaatggccacttcttggggcacagtctttttcatgctggtggtatcctgtgtttgcagcgctgtctcccacaggaaccagcagacttggtttgagggtatcttcctgtcttccatgtgccccatcaatgtcagcgccagcaccttgtatggaattatgtttgatgcagggagcactggaactcgaattcatgtttacacctttgtgcagaaaatgccaggacagcttccaattctagaaggggaagtttttgattctgtgaagccaggactttctgcttttgtagatcaacctaagcagggtgctgagaccgttcaagggctcttagaggtggccaaagactcaatcccccgaagtcactggaaaaagaccccagtggtcctaaaggcaacagcaggactacgcttactgccagaacacaaagccaaggctctgctctttgaggtaaaggagatcttcaggaagtcacctttcctggtaccaaagggcagtgttagcatcatggatggatccgacgaaggcatattagcttgggttactgtgaattttctgacaggtcagctgcatggccacagacaggagactgtggggaccttggacctagggggagcctccacccaaatcacgttcctgccccagtttgagaaaactctggaacaaactcctaggggctacctcacttcctttgagatgtttaacagcacttataagctctatacacatagttacctgggatttggattgaaagctgcaagactagcaaccctgggagccctggagacagaagggactgatgggcacactttccggagtgcctgtttaccgagatggttggaagcagagtggatctttgggggtgtgaaataccagtatggtggcaaccaagaaggggaggtgggctttgagccctgctatgccgaagtgctgagggtggtacgaggaaaacttcaccagccagaggaggtccagagaggttccttctatgctttctcttactattatgaccgagctgttgacacagacatgattgattatgaaaaggggggtattttaaaagttgaagattttgaaagaaaagccagggaagtgtgtgataacttggaaaacttcacctcaggcagtcctttcctgtgcatggatctcagctacatcacagccctgttaaaggatggctttggctttgcagacagcacagtcttacagcacatcatcagctgggtaaattgatactcacaaaggcagagttaacggcatccacaaatttttcctcatccatgctaactagctctgctgcatgttcatgggacgtggaccaaaccaaggaactcaaggtgtctgagagctgtgtcaaaagaacaccaataccaacggctaagactctgctgcacttggaaactctcaagcataaaaagacaaaaagggaacttacaaacagcctgggcagattcccttgaaaccagaaaaaggctgagagaaagtgaagaggaaaggcttgcatgcatgtgggcggactggtcagaaggacctcttaccgggagcagagcaataggcccagagggaagaaatctctgccaggctacgttgttttctgtggcctgcaacagagaggagaaaagtttctctgtgaagtacctagtgcctatgaataaagtccccagatggcagctcaggatcttacctctgataaatgcagagtagccacaacagcagactggtcatagttccagctcacattctggattccaacagcctgccgtactccggagttgtgaccatctgcacctatctgcatggacacatgagcctgctaagtcttccagcctcttcataaactgcttcagaagtttttctctgctccctaaagtttcctccagctctgattgttgtgtggcaggataattccatcaggcctgcttcactcacagcccctagaggtggagcccctgcactgtcacatcagcctcagccaacagagccaaagctggacatgactgaacaggtgccagccatgagttaaactcagccaggccctcctgatatttgaactagagagcaataaggaaagtttcagtatggggcacacactggagctgaatagttctgatgtagggttaggaatggctaccatgcaaaaagggaagcttgtgagcagaaaggagaaaaatgagaggcaagagatcaatgaccacagactcctcagagggaaagaacagcctccattcccaacactctggtgcctgtcctgtgaggcccagctatctgttatttcacaacctaagacggcccatgagattgctccctgtacaggatttacgatgagaccatctccacttgagctggcctgaataggtactggtcctcataaccaaaagttttgcctaaaattaaactatagcttaaatcgaaaaccagagtccctagaatctaggataagatgtagatatacaagacccctagcaaaataagaatcttcaactaccaacaatttggtctggaaggtgctgccatcacctagggtaatatgaacccaagggctggagtcggccataggaaatggacaaggccaggtatagcgaatggctttgctcctgtagagaaccgtcactcggtctggggaggtcaaaagagaggaaaaaaaattagaaaggtgggccacataggctgaggaaaaagccataactaaacctaaagcaaggtcccaggacagcagtgtcttgtcatttaagattaaaaaaatcagtaattaaaaaaaaaaaaaaaaaa

SEQ ID NO: 57668 - DNA, 1026 bp, Homo Sapiens
ggggcactcgctcttttcattcacgaaggtagtgaggcctagtggaaagccatggagagcgctctccccgccgccggcttcctgtactgggtcggcgcgggcaccgtggcctacctagccctgcgtatttcgtactcgctcttcacggccctccgggtctggggagtggggaatgaggcgggggtcggcccggggctcggagaatgggcagttgtcacaggtagtactgatggaattggaaaatcatatgcagaagagttagcaaagcatggaatgaaggttgtccttatcagcagatcaaaggataaacttgaccaggtttccagtgaaataagcaattatacttgagacctgaattacaatatggcaaagactcttaactaacttctactcaatcaaccagatggataaaccaatgctgttcatttgtttggtaaaacatactaactgatgtccccagtttgctgaccatttgtggccaggaagcttctgtgtataatgcttatatacttttatcctcacaaatcaaattgtttacttattaagagtcaatttgtgtttgtttccaaacttatgttgggtatattttttattaaatattctgtaaaatgatgaactattagtgtaaaagctagagttagttctataaaaactaagttgaatgttctaaaaaaagtgagtaaaattacttctttgaaaaattggccgtcaaattagtgttgaacaaagacaaatgtaaaatattggaagaacttacaaaaaagaaatctgctctcctgattgtttcatatgtgtcgaagtttgtgctgtactttactagaactgaaattgtaatcataaatgatagaatatgggtgtgatgcatgcaagaaagactggaattcaagtccgcagatccaatctcaaagacaaggtcttggccctacacagaggattggtgaatgaattacatttatacatggtttaagtgaaaataaaatgattaccatgtgaaaataaaaaaaaaaaaaaaaaaaaaaaaaaaaa

SEQ ID NO: 57669 - DNA, 1444 bp, Homo Sapiens
ggggagagtagggtgctgtggtctgagctagagggtgaagctggcggagcaggaggatgggcgagcagtctgaatgccagaatggataaccgttttgctacagcatttgtaattgcttgtgtgcttagcctcatttccaccatctacatggcagcctccattggcacagacttctggtatgaatatcgaagtccagttcaagaaaattccagtgatttgaataaaagcatctgggatgaattcattagtgatgaggcagatgaaaagacttataatgatgcactttttcgatacaatggcacagtgggattgtggagacggtgtatcaccatacccaaaaacatgcattggtatagcccaccagaaaggacagagtcatttgatgtggtcacaaaatgtgtgagtttcacactaactgagcagttcatggagaaatttgttgatcccggaaaccacaatagcgggattgatctccttaggacctatctttggcgttgccagttccttttaccttttgtgagtttaggtttgatgtgctttggggctttgatcggactttgtgcttgcatttgccgaagcttatatcccaccattgccacgggcattctccatctccttgcaggtctgtgtacactgggctcagtaagttgttatgttgctggaattgaactactccaccagaaactagagctccctgacaatgtatccggtgaatttggatggtccttctgcctggcttgtgtctctgctcccttacagttcatggcttctgctctcttcatctgggctgctcacaccaaccggaaagagtacaccttaatgaaggcatatcgtgtggcatgagcaagaaactgcctgctttacaattgccatttttatttttttaaaataatactgatattttccccacctctcaattgtttttaatttttatttgtggatataccattttattatgaaaatctattttatttatacacattcaccactaaatacacacttaataccactaaaatttatgtggtttactttaagcgatgccatctttcaaataaactaatctaggtctagacagaaagaaatggatagagacttgacacaaatttatgaaagaaaattgggagtaggaatgtgaccgaaaacaagttgtgctaatgtctgttagacttttcagtaaaactaaagtaactgtatctgttcaactaaaaactctatattagtttctttgggaaacctctcatcgtcaaaactttatgttcactttgctgttgtagatagccagtcaaccagcagtattagtgctgttttcaaagatttaagctctataaaattgggaaattatctaagatcattttccctaagcattgacacatagcttcatctgaggtgagatatggcagctgtttgtatctgcactgtgtctgtctacaaaaaaaaaaaaaaa

SEQ ID NO: 57670 - DNA, 2243 bp, Homo Sapiens
gactcgccgtactcggcgcgctcctgctgagggtcgccggagatgtcgctcggccgccttctaccaggagcctgatccgtgccgcccgccgcccggatgggaccaccagagtgctctaaagtctccagtgaatattgaattgctgaggattttgggaaaagacaaatcaaagttcccattccatggatcccttaggtgcaccttcccagtttgtggatgtggatacactaccaagctggggtgactcatgccaagatgaattaaattcctctgatactacagctgaaatatttcaggaagacactgttcgatcaccttttctttataataaggacgtcaatggaaaagtggttctttggaaaggagatgtggcattactgaactgtacagccattgtgaataccagcaatgaaagtctcacagataagaatcctgtgtcagaaagtatcttcatgcttgcagggcctgatttgaaggaagatctccagaaacttaaagggtgccgaacaggtgaagcaaaattgacaaaaggattcaatctagctgcccggttcatcattcacacagtgggacctaaatataaaagccgctatcgcacagcagctgagagttccctttatagctgctacagaaacgtacttcaactagcaaaagagcagtcaatgtcttctgttggcttctgtgtcatcaattctgcaaaacgtggttatcctttagaggatgcaacacacatagcacttcgcactgtaagaagattcctagagattcatggggaaaccattgaaaaagtagtatttgctgtctctgatcttgaagagggtacttaccaaaagctgctacctctctacttcccaaggtcattaaaagaggagaatcgatcattgccctacctacctgcagatattggaaatgcagaaggggagcctgtggtacctgaacgacagattagaataagtgagaaacctggtgctccagaagataaccaagaagaggaggatgaaggcttgggagttgatctctctttcattggctctcatgcttttgctcgaatggaaggagatattgacaagcaaagaaaactgatccttcagggacaattatcagaggcagctctgcagaagcagcatcaaagaaattataatcgctggttatgtcaagcaagatctgaggatctgtctgatattgcttctctaaaagccttataccaaacaggtgttgataactgtggtcgaacagtgatggtggtagttggaagaaacattcctgtaacattaatagatatggacaaggctctcttatatttcattcatgtaatggatcacattgctgtgaaggagtatgtattagtgtattttcacaccctgaccagcgaatacaatcacctggactccgacttcctgaagaaactctacgatgttgttgatgtcaagtacaagaggaatttgaaggctgtttattttgtacatcccacatttcgttcaaaggtgtcaacatggttttttaccaccttttctgtctcaggactgaaggacaaaatccaccatgtggacagcctccaccagctgttttctgccatatcaccagaacagattgactttcctccttttgtccttgaatatgatgccagggtaagaagtaccagaagttctccctcacctggtatggtatattaactgttctatagagcagcacttacgagcacaacatcctgtcattaccagatattaatgtaaattagtgagtcttaataaacttggtaatatcatttaacatactttccctatgataactttaggaaaaggatttgtcccaagagaggcattttctccagataaacgtttcagtgggagatctctctgctgtgagttcagaaccaattttcgtttgtattgtaagttttctaccatatttaaaacagatacctctgcctaattttcttaagattgaatggctttccatctacacagagccagaagaatttattggtgatcacttttagaattaattgcaaatcatgtggcctatctcagtagtctttaccctgctaaaagtttcatttatctaaaaggttgtataatgtttttaagagcatcatctgataatattattgttgttatttatagatgcgtttatggatctgttacataagcactagtcacaggactactcgtgaatttcatcaatttattctattgtgtttattcatgatatcaccttagtaatttttgaaaaaaaaaaaaaaa

SEQ ID NO: 57671 - DNA, 3483 bp, Homo Sapiens
ccacgcgtccggaaaatttaaaaatccgtgtgtattttcttgctagtgctggtacttgaatatctgtatcatccacctatccatccacctacccatatttctataatccaccgtccatcgacatgcctgtcatctgtccaccatttctctctgtctaattttcaaaacatcctgtaagtttatataaaggaagatttttcttcttgtgaagttctctaaggctgacaagttacctggcatgactgtggcggatgcccatagccaggtggtcctcggggtacagatggggcaggggcacttgtgagaaacacctgaagtgcttttccccagcctccccggccctgcccgggtggtggaggcgctgcacggtgccttccatggagcaagcccggggctccgcagggtcctcagcatgattcagatttccttccacccccagctctagatgatttggtaaaaccacaaacaggcacaaaacagcccacatggaattctaaagttttaatttcattttggaatttatgcactcagatgaaatgatttatgatgatgttgagaatggggatgaaggtggaaacagctccttggaatacggatggagttcgagtgaatttgaaagttacgaagagcagagtgactcggagtgcaagaatgggattcccaggtccttcctgcgcagcaaccacaaaaagcaaatgcagaagctcgtgaaggccgcgaaggacggcaccaaggacgggctggagaggaccagggcagccgtgaagaggggccgctccttcatcaggaccaagtctctcatcgcacaggatcacagatcttctcttgaggaagaacagaatttgttcattgatgttgactgcaagcacccggaagccatcttgaccccgatgcccgagggtttatctcagcagcaggttgtaagaagatatatactgggttcagttgtcgacagtgaaaagaactacgtagatgctcttaagaggattttggagcaatatgagaagccgctgtctgagatggagccaaaggttctgagtgagaggaagctgaagacggtgttctaccgagtcaaagagatcctgcagtgccactcgctatttcagatcgcgctggccagccgcgtttccgagtgggactccgtggaaatgataggcgatgtcttcgtggcttcgttttctaagtccatggtgctggatgcatacagtgaatatgtgaacaatttcagcacagccgtggcagtcctcaagaaaacatgtgccacaaagcccgcttttcttgaatttttaaagcaggaacaggaggccagccccgatcgaaccacgctctacagcctgatgatgaagcccatccagaggttcccacagttcatcctcctgctccaggacatgctgaagaacacctccaaaggccaccccgacaggctgcctcttcagatggccctgacagagctcgaaacactagcagagaagttaaatgaaagaaagagagatgctgatcaacgctgtgaagtgaagcaaatagccaaagccataaacgaaagatacctgaacaagcttctcagcagtggaagccgatacctcattcgatcagatgatatgatagaaacagtttacaacgacagaggagagattgttaaaaccaaagaacgccgagtcttcatgttaaatgatgtgttaatgtgtgccaccgtcagctcacgcccctctcatgacagccgtgtgatgagcagccagaggtacttgctgaagtggagcgttccactgggacatgtggacgccatcgagtatggcagcagcgcaggcacgggcgagcacagcaggcaccttgccgttcacccgccggagagcctggccgtggttgctaacgcgaaaccaaacaaagtttacatggggccaggacaactgtatcaagatttacaaaacttgttgcatgacttaaatgtaattggccaaatcactcagctgataggaaaccttaaaggaaactatcagaacttaaaccagtcagtagcccatgactggacatcaggtttacaaaggcttattttgaagaaagaagatgaaatcagagctgcggactgctgcagaattcagttacagcttcccgggaagcaggacaaatctgggcgaccgacgttctttacagctgtgttcaatacgttcacccctgccatcaaggagtcctgggtcaacagcttacagatggccaagctcgccctagaggagaaccacatgggctggttctgtgtggaagacgatgggaatcacattaaaaaggagaagcatcctctcctcgtcggacacatgcccgtgatggtggccaagcagcaggagttcaagattgaatgtgctgcttataaccctgaaccttacctaaataatgaaagccagccagattcattttccacggcacatggtttcctgtgggtaagatgtgtttatttggttttggtacaagttcacagagaatcaacgttcatggtcggtgtgatgagagactgagatgtgaattgctcagtagagagttggcggtggcgtatcccagagtgtacttagaaacatgaaaacttctttgaaagggagctgatcacttttggaaaagatttacagttcttaggaatgcaaatatttgtttcttttccttttcatctaaaacatttaccagataaagttgagtccagagacaactaactaataagagaataattttaatatgtttttccattttggtgtcaacattgcatggattttttttcttgttccaagactggctttttccagtggaaacttagcagttaaaattaatttgttccaaatgaaatattgcatctgaaattaggctggaattgcagtagacgttcctggttcttgcaaaccagaggacattcttgaagctgtgtggtcccaggctctcccctctctggtttcctgtgttccctccctgcagcctcagactcgccctccagggctccactgtgcttttccaaactctcatcctttcctcccaggcgtcctgtgcagcacgccactgcctctcacttctcacatccacagctcctgcttggtcagtgttcctagttgagtgtcagaaattgaacaacccaattagctggtatttcatttgtaccaacctatgaatggaggagtagccttaattcccttgggggcttccacttctaagagaactgttttccgtccaggtaggcagacctgtcatggctgaagcttcatcacctggcctggtcatagcccccaggccctgtaggcaggacaggggcttggcagattggcatccttcccacaaaagcatgaaagtaggatgtctgtatgtagcgacaacaaatacaagaataaggagagtttaacaacattctcaaagttggtggaaaagaaaaagaatcaatgaaaacatcaccctaaaccagctagtgctttctgtttacagggatcagaccccttcccacttaaaaaaaaaaaaaaa

SEQ ID NO: 57672 - DNA, 2285 bp, Homo Sapiens
ggaggaatggtcacatttatgagttaactggaagaaagagacagagaaggagtgtcaagagaggtgaaagccaagagcaggtgccaaagaaagcgagtacacttctaaggaaggaggaaatggtcagtgagtcaaaatattcccaagaggggtccagctagcgaggaggaaagctgtgatggggtgcaggagtggaggagaaacgtggcaactgccgaataaacacaccaaccagggaagacggccaaggctgggcccagaatatctggaatggaacccatcttccttttgcagcaggaagtggagttggaagctgagttgactgtggaatttccgagcttggaggatattactacaagaccttaacggttgttggaggcacaagatggaatgagcctagatccctgaatcactatgtggaggaaggccattatgaaacaggaatattcctttattgtgtccgtaagatctaaacttctattacgttggagtcatttattcttgggtctctgttccactagccagcattactgtaactaacatatttcttaaagcccttctttgttactcacctttcatcatacatggtaacccagcgccttgtgatggtgggtgtgaagtgctccgcacatgtgaaatctgactgtgatcaatgctttactaatgttccaacacaaaatggaatctaagtcagctgcactaatgtgacagagactggtgctaataattactgacatttggagaggacctgatggcttggacatcacttttcacaccctttattctttttaatccttactacatccccgagaggcagacttttatcattacctccattttacagaagacaaaatggagttctccaaacttgccgaaggcttcacagctggccattagatacccgcacccgacctccttcccctcgttgtcctgtgaggaaacgatgaggagacttctcagctccactccattttacaccaatcaggctccaaaggcctccttggtgaggtagaaaaacagattctacccaaggctgctggtgctgctggtgtgacttataaggagaatttgcagttcccaggctttagttgaacctgcctgccctaggaatctgttcttgaagacaacagcaaggtattcctgggggcttctgcttggtggtagattacttgcaaagatggctgccaaggagtccttcaattcctgatgcacagtggttatgggttgaattgtgtccccctaaatatgctggggtcgtaaccctgagtaccacaagatatgaccttagttgaagataaggcatgatgtattgtttgtgtgtgtgtgtgtatgtatatatatacaccgtatattgtgtgtgtgtgtgtatattacacacacaatatactgtgtgtatatatacgcacacacacacgatattgtgtatgtacatatacacccacacatacacacacgattatattgtgtatgtgtatacacacacacacacacacacacacacacatgtttttgtccatggttcttatttcataactcccatagcccttattatttcctaaatgaccaaaacatatcttttgttaaaattatttgtccttttgtctttggttcctgaagtagcttcagaacagcttcagagccatgaaggtgaaaggcagtctttcgttataatgttgggggactttaggcctcagaagacagaactgctctctctgaccttcttcatctacctttcacctgcttctttttctccccaaggcaggctgtagaaatgaaagatatattctaatttccccccatctttctgtcttggagctagccataaagaaattctctgacttatctaattgcaggtcataaaatcctcatttcagaggggtcttgccccattccctggaggaaggactgctgcacggagaggctaagaagaatctgaacagacaggccttgctgggtttccccactcagtctattagtattagattataccctttttgtctaatcacatttctacacagttgtccttataccaatcatgtctatccgatgaagtctccataaaaggcctaagaggaggggtttggggagtttctggacagctgaactcataggaacatgaacaagaactcatccacgtgcccagagggtgttgtaccccaactcataagaatggaagctcctgttctcaggatacttccagacctcgcctgtataatcccatcatctggctatttatttgtattatttaaataaagatattacattaattaaaaaaaaaaaaaaaa

SEQ ID NO: 57673 - DNA, 2840 bp, Homo Sapiens
agcggagctttttcggcgtcgagactggaggctgagtgctaaactgtgtggggcgcggatgggatccagctgttagtcggctttgtgttattcttggaaaatttcgcaccacttgtgaattccttgaacctgggcattgcaaacccacttctgttgggcccatctcctttgcactttgctcagattaagactcagttggcgcttcagcagctgaatgccgttgcctcacatggttcaacaccaccttatactttattaaatcaggctttcttgaaaatagccatgtcgagacccaggtttaatcctcgaggagactttccacttcaaaggccacgagcacctaacccttctgggatgaggcctccaggaccatttatgaggcctggatctatgggtctcccaagattttacccagcagggagagcacgtggaattccacacagatttgctggccatgaatcttatcagaacatggggccacagagaatgaatgttcaggtaactcaacacagaactgatccaagattgaccaaagaaaaactggattttcatgaagcacaacagaagaaggggaagcctcatggtagccggtgggatgatgagcctcatatatctgcatcagtggcagtgaaacagagttctgtaacacaggttacagagcagagtcccaaagtacagagccgctatacaaaagagagtgcctcaagtatcttagcaagttttggattatctaatgaagacctagaagaacttagtcgctatcctgatgaacaactaactcctgaaaatatgccattaattttgagggatataagaatgcgaaaaatggggcgccgattacctaatttaccttctcagagcagaaataaagaaacacttggtagtgaagcagtttcaagtaatgtgatcgattatgggcatgcaagcaaatatggctacacagaagatccacttgaagtacgtatttatgatcctgaaattccaactgatgaggtcgagaatgaatttcagtcacagcagaacatttctgcatctgttcccaatccaaatgtgatatgtaattctatgtttcctgttgaagacgtatttcgccaaatggacttccccggtgagtcctccaataatcggtcctttttctcagttgagagtggaaccaagatgtcaggcttacacatttcaggaggacagtcagtccttgaacccataaaatccgtcaaccaatccattaaccaaacagttagccagacaatgagtcaatctctgattcctccatctatgaaccagcaacctttttcgtcggaattaatttcatctgtaagccagcaagagcggatcccacatgaacctgtgattaattcatctaacgtacatgttggatcaagaggaagtaaaaagaattaccagtcacaggctgacattcccattcggtctccctttggtattgtgaaagcatcctggctaccaaagttttcacatgctgatgcccagaagatgaagagacttccaactccttctatgatgaatgattattatgcagcatctccaagaatatttccacatttgtgttctctgtgtaacgtagaatgtagtcatttgaaggattggattcagcatcaaaatacatctactcatattgagagctgtcgacagttacgtcaacagtatcctgattggaatcctgagatcctcccatcgagaagaaatgagggcaatagaaaagaaaatgaaactccacgaagacgttctcattcccccagtcctaggcgttctagaagatcaagctcaagtcacagattccgtcggtctcgaagcccaatgcattacatgtataggccgagaagtcgaagtccaagaatttgccatcgtttcatttctagatacagatccagatccagatcccgttcaccatatcgaattagaaatccatttagaggtagtccaaaatgctttcgatcagttagccctgagaggatgtcaaggagatcagtgagatcatcagatagaaaaaaagcattagaagatgtagtacaacgatctgggcatgggacagaatttaataaacagaagcatcttgaagctgctgataagggacattcaccagcacaaaagcctaaaactagcagtggaacaaaaccatcagttaaacctacaagcgctacaaagagtgattcaaatctaggaggacattctattcgttgtaaatcaaagaatcttgaagatgacactttgtcagaatgtaaacaggtgtctgataaagctgtttctctccagcgaaagcttcggaaagaacagtcattgcattatggttcggttcttcttataactgaattaccagaggatggttgtactgaagaagatgtgagaaaattatttcaaccatttgggaaagtgaatgatgtcctaattgttccatatagaaaagaggcttacctagaaatggaatttaaagaggcaattactgcaattatgaagtacattgaaacaacacctcttacgataaaaggaaaaagtgtgaaaatatgtgttccaggaaagaaaaaagcacagaacaaagaggtgaagaaaaagactttagagtcaaagaaagtatctgcatctaccttaaaaagagatgcagatgcttcaaaagctgttgaaattgttacttcaacttctgctggactgctccctacaggcgggggcaacaattacccacagattgtgttggctccaggcctttgtcattaaatctgtactaaataaatacaagcagctccagcttattggggctgcgttctctcttcggcgtctctaaggccgagcagtttcctagctgcgctcacgcaaaaaaaaaaaaaaaa

SEQ ID NO: 57674 - DNA, 2010 bp, Homo Sapiens
ggggttccgaaggcccctttatgcccggcagacccctaccgacggcggcattccattctggggccacgaggaggcactcatcgtttcgttccaaccgccgccaacggccctggccctcgcgagctctggaactacagaggtcgcacggtgagttgccaggtgtggcccgtaatcggagcgcacaaaacatgatgggacacgtaacgggaccacacagggcacattgggcacttgcaggggcgcgaggtggcggcacgtaatgggagcgcgctgagcatgatggggcatgtgcgggagcgccaggcggggcatgtaaccagagcgtgcggggcatgatggggcacggacatggggggttaggtggggcacgtaattggagctcgcggggcaggatggggcatctaactggagcgacagagagcacgatggggcacttacaggggccggaggctgggtacgtaatgagagcgagcgggaaatgatggggcacctaacgagcacgcagagcatgatggggcacgggtgcgaggtggggcgcacagtgggagcgcgtggggcatgatgggacacatggcgaggccgtcagggcacaggggaagcacttttggaacacgtgagtgacagggctgccgcccttgaaggagccctcggagtggctgcgtggtggggcacgtggggcaggttcaggaaaaaggatgcagcatgtgattgcagggcaacctggtgaggacacgagagccacctgccaccagcagggttcagggctcccagctgtgggttacttccaccttctttcactttccctcttccattgtattctagagaatttaggcccagacaagacactgattgattgattgattgattgattgacagaggctcgctctgagcccaggctggagttcagtgatggatctcagctcactgcagccgccacctcctgggctcaagagatcctcctgcctcggcctcccaagtagctgggattacagacgtgcaccaccaggcccagctaatttattttttagtttttaatttgctggtaagatggtttgtagctttgttgcctaggctggtcttgaactcctggcttcaagcgatcctccagtcttgacctcccaaagtgctgggattataggcgtaggctacagccaactttcaatactgccccattgggggttacgtttccaacacatgaaattaggaggatacattcaaaccacagcagtatattatgaccataatattcattaactgtgtaacaggctgggcgcggtggctcacacctgtaatcccagcactttgggagaccagagtgggtagatcactcgaggtcaggagtttgagaccagcctggcccacatgatgaaaccgcctctctactaaaaatacaaaaaattagccggtgtggtggcaggcgcctgtaacctcagctacttgggaggctgaggcaggagaatcacttgaatccgggaggtggaggtggcagtgagcctgattgcaccactgcactccagcctgggcaacaagagcaaaactctgtctcaataaacaaacaaacaaacaaaacctgtataacagagtgtcattgaatttctaaacgttgaaagacttcacattaaaaaaaaactcacaatttaatattattgagtgaaagaaaccagacacaaaagggtacattctatatgatgctgtttatgtgacattcaaaaacaggccacatgacaacatggtaataaggacagtggctgtccttgttaggagttatgactggaaggaggcaggagggagctttctggaaacactgtacatcttgctcttgagagtgcacgtatatacatcaagtgtttatcaagctgtgtggttaagatttgcacacttgtatatgttatacctcgatttaaaaaatctaaataagtaaataaagataccttcaaatcttttaaaaaaaaaaaaaaaaaaaaaaaaaaaaaaaaaaaaaaaaaaaaaaaaaaaaaaaaaaaaaaaaaa

SEQ ID NO: 57675 - DNA, 1430 bp, Homo Sapiens
ctatatgatcttttgtgtctggcttcttttggcatgatgtttttgaattttatccacgttgcagcatgtaccagtgctttcattcttttttattgtccaatagtatttcattctatggatgtcacattttgtttatccattcatgagatgatgatggacatttggattatttctacttttcagctaattatgaataatactgcctatgaacatttatgttcaagtctgcgtggatatgtttttaggacttgctgggccatatggtaaatttatgttctaagaaactggcagtgtttataagggctcaagtcgttttgttgtgttttgagatggggtctcactctgtcacccaggctagagtgcagtggtgtgatcttggctcactgcaacctccacctccctggctcaagcaatcctcccatcttagcctccctagtggctgggattataggcgtgcgccaccaccatgcctgattaatttttgtattttttgtagaaatggggtttcgccgtgttgcccaggctactcttgaactcctgggttcagtgaagtagtctgcctgcctcggcttcccaaagtgttggaattacaggtgtgatccaccacacctgaccagggctcgagtttctccatatcctcctcaacgtttgttactcttttttattatagccatactagtggatatagggtatctcgttgtagttttgattggcatttccctaataattactgatgttgagcatctcttgtgcttaaggccatttgtttattgtctgtagtgaaatgtttattcaaatcttttgcccatttttaaaagggggttggttattcgttaacaagaattcattactctagacataaagtctcatcagattttttctcctattctgtgactttctcagtagtatcttttgaagcgtttactttttgatgaagtcctatttatcatttttaaaaattgcttttgcagttttatggttatctaagaaacattgcctaattaaaggtaatgaaaatttactcgtacgttttaagagttttataattttggctcctacatttaggtctgtgatctatattgttttgtttatagtgagaggtaagggtataatttatctttttgcatgtgggtgtgtgattattccagcaccttttattgaaaagactgtcccttccctattgaattgccgtagcatcttatgaaaatcaattgaccataaatataagggtttatttccggattctgagttctcttttgttctgtaggtgtatccttcatgctaatactgcactgtcttactgactgtagctttatagtgaattttgaaatttggaattataagccctctaactttttcaggaatgttttgactatgccgggtcctgtacagttccatacaaaaaaaaaaaaaaaaaaaaaaaaaaaaaa

SEQ ID NO: 57676 - DNA, 1725 bp, Homo Sapiens; identical to SEQ ID NO: 27122

SEQ ID NO: 57677 - DNA, 1601 bp, Homo Sapiens
gcttcctcctccccgccgccgccctcgccatggccgcgccggccccgggcctcatctcggtgttctcgagttcccaggagctgggtgcggcgctagcgcagctggtggcccagcgcgcagcatgctgcctggcaggggcccgcgcccgtttcgcgctcggcctgtcgggcgggagcctcgtctcgatgctagcccgcgagctacccgccgccgtcgcccctgccgggccagctagcttagcgcgctggacgctgggcttctgcgacgagcgcctcgtgcccttcgatcacgccgagagcacgtacggcctctaccgggtgagagctacgggggccgccggggatcacgccgagagggccacagccaccgcctacaccccggctacggaggccgccgggggccatgccgaaagggccgcgcccactgtctgcacctcggctacgggggccactgggtatcatgccaagagggccgtgcccactgcctgcacctcggctacgtgggtcgctgggggtcatgccaagagggccgcgcccaccggttgccctcggctacgggggccactgggggtcatgccgagatggtcacgcccactgcctgcacctcgactacgggggccgctgggggtctagccgacagggctcgcccgcctcctgaaccccgcctacagtgggtcccgcaggacctcactgcgccctctgcctttatctaggcagggctagaaatggtctacttgcagtccgtcttcctgcttcatccggtggccaggcagagggaacggcacgggcaagggcctggaagggaatccgagtggcccatgtcaaacgatgcccataactcagccccgtagcggacgggggcacgaggaatcaggtgtagagcctgaatctcagggtcctgatctctaaccccagcgagttctcggggatccctgggcagctttgccgctctgatggctctgcttccaggctgttcatctttggctttgagcctcaggattctatagaatcagaggagcgcgctcttttaaagacagggtaactgaggcttggaggagccttggcctggccgagggaagagtgggaggggcgggctcaaaggccaggaacctcaagtcacttgagtctggcagcgtcaagggacaccccatgctgggtgtgccgtcttctctttgcatagaatcttgagctgatgatggttttgtgggttttttattaagagaaaaggcttactgaacgctttatatgcatcaattcatgagtccgtaccacagcctatgagatgttacactcatttcacagatggagaaactgaggccagaagaggtgagcttacctgcccaaggcatctagtgaccagaggggcagccagggtgtgatcctgcctcatctgacttcgtagttgggtacacatttaacttccgccttcctgtgtgtgttttccaagagcatcattaaaaagttttggccgggtgcggtggctcacgcgtgtaatcccagcactttgggaggccgacgtgagtagatcacctgaggtcaggatttcgagaccagcctggccaacatggcaaaactctgtctctactaaaaaaaaaaaaaaaa

SEQ ID NO: 57678 - DNA, 1261 bp, Homo Sapiens
ggcacgaggcggaagtgttgtggccgccgccgccgcgcgtcgcggaggcacgtgtggagccccggcagcaggagcgtcgcaggtccttggcccttgccagacattagcaccatgagcttcgtggcatacgaggagctgatcaaggagggtgacacggccatcctgtcactgggccatggtgcaatggtggcagtgcgtgtgcagcgtggggcacagacccagacccggcatggtgtcctgcggcactcagttgaccttatcggccgccccttcggctccaaggtgacgtgcggccgaggtggctgggtgtatgtgctgcaccccacgcccgagctctggacgctgaacctgccgcaccgcacgcagatcctctactccacagacatcgccctcatcaccatgatgttggagcttcggcccggctctgtggtctgtgagtctggcaccggcagtggctctgtgtcccacgccatcatccgcaccattgcacccacgggtcacctgcacacggtggagttccaccagcagcgggcagagaaggcccgggaggagttccaggagcaccgtgtgggccgctgggtgactgtgcgcacccaggacgtgtgccgcagtggctttggcgtgagccacgtggccgacgccgtcttcctggacatcccatcaccctgggaggccgtgggccacgcctgggacgccctcaaggtcgaaggcgggcgcttctgctccttctcaccgtgcatcgagcaggtgcaacgcacatgccaggcgctggcagcgcgcggcttctcagagctgagcaccctggaggtgctgccacaggtctacaacgtgcgcactgtcagcctgccaccgcccgacctgggcacaggcacagatggccctgccggctccgacaccagccccttccgcagcggcacgcccatgaaggaggccgtgggccacaccggctacctgaccttcgccaccaagaccccaggctagggggccgcctcccagggcaccagggagctgggagcactgaagggctgggcagggaggccagaggcaccttatatggtcagcgatgcctgccagacacagacggtggggtggggcttgggggcctcctgggtggccagagtgggacagcaggaagggcggctgtgatggaggagcagtgctggggctgggcctcagccattcctgtccagccctgtggcccatcccagctgctgtttgttgccaatatgaagtatccactgccaaaaaaaaaaaaaaaaaa

SEQ ID NO: 57679 - DNA, 1433 bp, Homo Sapiens
ggtgcttggggccccgacgcgtacccaggtgccatctggccctcacctcccgccgtagctggctgtgacgcccgccatgggcacactggggcagtgcagtgagaagacgaggatgcccagcaggctgacaacggtgcagaacaggcagaacttgatgaccgcggagccccggagcctgagcttgttcacaaagaagccgcccaggaaggtgccgccaccacccgctggcaccaccagggcagccacaccccctcctcccccaggggcctctgccgagtccctgcaggctgtgacaaggacatttgtcgaagcctgagtggccaccaacagtaaaaaattgcgattagctggcatctagcttctgggctgacaagtgaggagggcacagacctgcccagcctgggaaggccagcctgcctctggcaccgagaaacccccagctgcactgttccaggaggtcctgaggcaccagtgcctggctcatggaacagccaggtccaaacccttcctgcaccaagtcacagaagccaagactaggtggctagggggtggagcccaccgtggacccttccacctacggagcatgtcccacaaagagggcaggaccaccactctcccggcctgtggacagagtcgctcagcccccgtggcgctctccacacctgctctggcagcgggggtgggagggcactcactgccatgtgccctgtctgggtctttctagaagatgcccttgaagactctgtttctgagaactgacataaaagcagaggacccccaagattcagttttctcaccaaacaaggtggcagcttctgaggcactcaggctgaactgggactccaagaacttggggctgaacgtggacatgccggtgatgagagtggcctcggtggccccggccaggcagagcaggatgaacgtggggttcttcagcaggagccagatggagctgggcagagtgtcgctgacttgaacccctgcgtctgcagcttagtgacatcctgtaaacctacactttccagcctctcaccagagcagactgtcggcctcacatcacccccacctgcaggagggcggctctttcctctcggccacacctagagcctggttccgatgaacgcaactctgaatgcctggaacattcaaatgctcttgtttgaggaggtggccaaatgtaaatggattctgaagaatcaggaacagacggtgcagccctagttagcctctgagccccaacaggcccacaggtgccttgcagagctgatgttggcgtcagaaactccgctccagcctcacaggcactctgcctgcttggaggtgttcgctggctcgctcagactgacctcagcagccatgaacatgggttctttctgtccccttccccgattaaaatgggagagcccagttctttcaaaaaaaaaaaaaaaaaa

SEQ ID NO: 57680 - DNA, 1411 bp, Homo Sapiens
agtctcctttaaggagagcttgtaggcttctaatttcacatttcagcaagctggctaaagacgtgggaaagcctgaccctggattcaggtcaaatctcagcactcacaagatttaaactcatatcccaggcatatgaagtgctttcagatccaaagaaaagggatgtttatgaccaaggcggagagcaggcaattaaagaaggaggctcaggcagccccagcttctcttcacccatggacatctttgacatgttctttggtggtggtggacggatggctagagagagaagaggcaagaatgttgtacaccagttatctgtaactcttgaagatttatataatggagtcacgaagaaattggccctccagaaaaatgtaatttgtgagaaatgtgaaggtgttggtgggaagaagggatcggtggagaagtgcccgctgtgcaaggggcgggggatgcagatccacatccagcagatcgggccgggcatggtacagcagatccagaccgtgtgcatcgagtgcaagggccagggtgagcgcatcaaccccaaggaccgctgcgagagctgcagcggggccaaggtgatccgtgagaagaagattatcgaggtacatgttgaaaaaggtatgaaagatgggcaaaagatactatttcgtggagaaggagatcaggagcctgagctggagcctggtgatgtcataattgtgcttgatcagaaggatcatagtgtctttcagagacgaggccatgacttgatcatgaaaatgaaaattcagctttctgaagctctttgtggcttcaagaagacgataaaaacattggacaatcgaattcttgttattacatccaaagcaggtgaggtgataaagcacggggacctgagatgcgtgcgcgatgaaggaatgcccatctacaaagcacccctggaaaaagggattctgatcatacagtttttagtaatctttcctgaaaaacactggctttctctggaaaagcttcctcagctggaagctttactccctcctcgacagaaagtgaggattacagatgacatggatcaggtggagctgaaggagttttgtcccaatgagcagaactggcgtcagcacagggaggcctacgaggaggacgaagacgggccccaggctggagtgcagtgccagacggcatgacgtggtgcggggcagcgtggcccgaccggactagcacatgatgaatgtaaagttggcacaatgaaaatgacatcgctttaatggccttgtgtttgggatgtcctgtgtatgtgttcagcattcttaattgctgagtgtctttttggcttttcttttggttgtaacttaagttatagcttaatttatatttaaatgttttaagtataaatcacctctagtctgcaaaaaaaaaaaaaaa

SEQ ID NO: 57681 - DNA, 1050 bp, Homo Sapiens
cttaaatctgtcgtttgaatttaggaccacctcggttcacaatggtccgtagtggaaaaaatggtgaccttcatcttaaacagattgcatattacaaacgaacttgtgaatatcattcaactacactgccaagtgagagaagtggcataagaagagcagcaaaaaaatttgtcttcaaagaaaaaaagctgttttatgttggaaaagacagaaaacaaaatcgtttggtaattgtttcagaagaggaaaaaaagaaagtcttaagagaatgccatgaaaatgacagtggagctcatcatggtatatccaggaccctcactctggtagaatccaattattattggacatctgtgaccaatgatgtcaaacagtgggtatatgcttgtcagcattgccaagtggcaaaaaatacagttattgtagcaccgaaacagcaccttctcaaggtggaaaatccatggagtttagttactgttgatctgatggggccttttcatacaagcaacagaagtcatgtatatgctataatcatgacagatttattcaccaaatggattgtgattttgcctctatgtgatgtttcagcatcagaagtttctaaagctattatcaatatatttttcttatatggacctcctcagaaaataataatggaccaaagagatgaattcattcaacagaaagtctttatctcttgcaaggttcagtagtggcagatcatgactacattggattgcctgaaattccgattggagcatatcaagcaaatattctggtggaagatgcaactattggtatagtcgataatgaattactgacatcaagcaaggatcgtgaactattagaatatagaaatacgaaaatctctccattgatagacgatcatagttctcttgaaaagcagactttcagtctgttggactcttcaaaccaggttcttgaatacttaagttagtaaataccaaaatttatttaaagtgcttgtttagaatataaattcttaatgatatcttattcattaaaaacgttgtatagaaaaaaaaaaaaaaa

SEQ ID NO: 57682 - DNA, 2022 bp, Homo Sapiens
ctttgcgagagtagcgcgggagctgagaagttgcagggttgagttggtcccggcaagtccttgagcagtttgttcctctgtcttcccgcttcctggtgccccgactgcgtccccacgaacgccccgtccttaccgccggctgctgtggagtgcctcgctgtctcccaggtccccgagtgagcgtcgaatgggacctctgtggctagggcaggcctgtgtgggtggcactgagagggaggaggggagggggatgttcgcagtttccttgcgaccccagggactttctttgtccccgccatccacctccttaggcctttgggatcgccgactggtctaatgtcgccggcccttgtggctctgggaaattagcattgattaatcttcctaacaatttttgtttttatagagacaggatctccctatgttgcccaggctggtctcgaactcctgggctcaaggtatcttcctgcctcggcttcccaaagtgctgggattacaggcgtgagcccggccagctcctaataatgttaagtgcttgctaggagtcaagcgctgtgctgagcgcaggggcttcccacgtcattgcgtccccagtgcttagtgccaggcactgagcagaggcgcgattcgtatttgaactaaaacgaaccccgtccctgaggaacaagacctctactgggaagtcaaagaaatgaatagtgattgtatggtgtgatgggtgctcagctcttggtggacagaagtaagggggaggcttgtttgagaaacggatacctgacctaagccttggaggaagaggcagacactggaaaactagagtccctgcgttctctcaccacttgctaaagggcctctacaaccccaggaaacctcaataaacctttcctttctccagatagatgtctgttcttgcagataattagaaaacgcattgcagagtattggttctttccctctcattaggttcctggtttcagagaagatgaccgaagaagtggatttcctgggacaggactctgatgggggtagtgaggaagtggtcctaactcctgcagagctcattgaaagattggagcaggcctggatgaatgaaaagtttgcccctgagctgctggagagcaagcctgagattgtagaatgtgtcatggaacagctggagcacatggaagaaaatctcaggagagccaaaagggaggacctgaaggtcagcatccaccaaatggagatggagaggatccgctacgtcctcagcagctacttgcggtgtcgcctcatgaaggtttgacgtggagatacctggagggattgagacagcacagtctgtaatgcagactgaatgtcctggggaaaacttgggctggggcccaggagggtccaggacctgaagatgctgctaagagcccaatatccatgtagctaaactgtaaggagagcgagagattgctccacagaagcacagaggaacgtgtgtggcccactgcggggacaccgcacacatttttagtctgttcacctgccgagtgagtggttcccccttgcgttacagcatggcagtgctaaagggagagttgttggcattggtcaatagtgaatgctgactagaggagaacttgtttccaaaattattttgtctgtcagatggccaacgtcagtgtcaaatgaaccaggatgacttacattcacctacagctttgtggctatctaacttacaaaaatgaagttgcaggccaggcgtggtggctcacacctgtaatcccagcactttgggaggctaggcgggtggatcacctgaggtcaggagtttgagaccagcctgaccaacaaggtgaaaccccatttctactaaaaataaaaaaattagccaggcgtggcggcaggcgcctgtagtcccagctactcaggaggctgagacaggagaattgcttgagcccaggaggtggaggtttcagtgagccaagattgtaccactgcactccagcctgggcaacagagcgagactccgcctcaaaaaaaaaaaaaaaa

SEQ ID NO: 57683 - DNA, 1493 bp, Homo Sapiens
gtgggcgggtcgccgaggagcctgaggaagagggcggcgacggtggtggtgactgagcggagcccggtgacaggatggtgagggctgcagttgcggcgaccaaggcctggctctcgggtggggtgctgcgttgttgggagccgtggggaggccgagggcgaggaattgggaaatcccggaggcctcggcgtcagggcccaggcgctggcctgggaaaggcccagaagaggtctagggaaggaagggagcggccacctctgggtgcggctggcctaggtctcgtatcccggccccaaggggccagaggccatccaaggggtaaaaaggcccctctagcagcccgacctgtcacgagacacgcacgcccgagccagggaaggcctttggtcctatacctcgaatgttccggggataggggcacggtcctccgtttccagacggttcctactcgtttcccgcaaaaagcacctcccgctggttggggtgtagtggtggaagctggcctctcggatgcagaacaggaagtagcgagcagaatttcgtacccgtttaactttgccatctagggaaagggaataaaccaccctcctcgctcctgaaataacatctagctgccattgagatgagcaggtgtgctctcagagggcgggatttggcgcttgcaattgctggaactgtttctttccacgggttgctacgcctctttagggtaggattccttaatgatgtgtgaactcattgaaactgttgggaaatttttgtgaatatacacatttttctggggagagtgccggtgttggagacttacctagtctcccccagccaccttcaagcaatcaccccttcacccccagtagtttggtgcccctcagaccttcctacataaaaactgggggcctctactagagaggactcagagctgtaatcatattttctttctttctttttgagatggagtctcgctctgtcgcccaggctggagtgcaatgccgcgatctcggctcactgcaatgccgcccgggttcaagcctcagctcctgcctcagcctcccgagtagctgggattacaggcgcccgccaccaagcccgtctaaatttttgtatttttagtagagacggggtttcaccatgttggtcaggctggtctctacctcccgacctcagatgatccacccgcctcggcctcccaaagtgctggggttacaggcgtgagccaccgcgcccggcctgtaatcatattttcaaaggtgcctttgactcttaaaaagtcaattgtttggggcaacccactcgggtccccttccaccctgtgtaagctttgttctttcgctcttcacaataaatcttgctgctgctcaaaaaaaaaaaaaaaaaaaaaaaaaaaaaaaaaaaaaaaaaaaaaaaaaaaaaaaaaaaaaaaaaaaaaaaaaaaaaaaaaaaaaaaaaaaaaaaaaaaaaaaaaaaaaaaaaaaaaaaaaaaaaaaaaaaaaaaa

SEQ ID NO: 57684 - DNA, 1025 bp, Homo Sapiens
gggggacctagctcgggaccggcctggagatggagttcgactgcgagggcctgagacggctgcttggcaagtacaagttcagggacctaactgtggaagaactaaggaatgtaaatgtatttttcccacatttcaaatattccatggacacctatgtttttaaagatagttctcagaaagacctgctgaattttactggcacaattcctgtgatgtatcagggtaatacatataacataccaattcgtttctggattttggattctcaccctttcgctccccctatttgcttcttgaagccaactgcaaatatgggaatcttagtcggaaaacatgtggatgctcaaggcagaatatatttgccctatctccaaaactggagccatcctaaatctgtcattgttggattaattaaagaaatgattgccaagtttcaagaggaacttcccatgtattctctatcatcatctgatgaggcacggcaggtagacttgctagcctatattgcaaaaatcactgaaggtgtttcagatacaaattcaaagagctgggcaaatcatgagaataaaacagtcaataaaattactgtggttggaggtggagaactcggtattgcctgcacattagcaatttcagcaaaggtggagtctcgctctgttacccaggctggagtgtagtggtacaatcttggctcactacagcctccgcctcctgggttcaagcgattctcctgcctcagcctccagagtagctgggactacaggcatgcgccacgacgcccagctaatttttgtatttttagcagagacagggttttgccatgttggccaggctggtctcgaacttctgacctcaagtgatccacctgccctggcctcccaaagtgctgggattacaagtgtgagccaccgtacctggcctgctattacctcttaattagaatttgagttgtattcagtcttttgtcactaaataaatgcttctataaacattccaaaaaaaaaaaaaaaaaaaaaaaaaaaaaa

SEQ ID NO: 57685 - DNA, 1060 bp, Homo Sapiens
ggcacgagggagagtactcgggttcgtgaacttcccggaggcgcaatgagctgcattaacctgcccactgtgctgcctggctcccccagcaagacccgggggcagatccaggtgattctcgggccgatgttctcaggaaaaagcacagagttgatgagacgcgtccgtcgcttccagattgctcagtacaagtgcctggtgatcaagtatgccaaagacactcgctacagcagcagcttctgcacacatgaccggaacaccatggaggcactgcccgcctgcctgctccgagacgtggcccaggaggccctgggcgtggctgtcataggcatcgacgaggggcagtttttccctgacatcgtggagttctgcgaggccatggccaacgccgggaagaccgtaattgtggctgcactggatgggaccttccagaggaagccatttggggccatcctgaacctggtgccgctggccgagagcgtggtgaagctgacggcggtgtgcatggagtgcttccgggaagccgcctataccaagaggctcggcacagagaaggaggtcgaggtgattgggggagcagacaagtaccactccgtgtgtcggctctgctacttcaagaaggcctcaggccagcctgccgggccggacaacaaagagaactgcccagtgccaggaaagccaggggaagccgtggctgccaggaagctctttgccccacagcagattctgcaatgcagccctgccaactgagggacctgcgagggccgcccgctcccttcctgccactgccgcctactggacgctgccctgcatgctgccctgaggatggcctggattcacgccctcttgtttccttttgggctcaaagcccttcctacctctggtgatggtttccacaggaacaacagcatctttcaccaagatgggtggcaccaaccttgctgggacttggatcccaggggcttatctcttcaagtgtggagagggcagggtccacgcctctgctgtagcttatgaaattaactaattgaaaattcaaaaaaaaaaaaaaaaaaaaaaa

SEQ ID NO: 57686 - DNA, 1406 bp, Homo Sapiens
ggctgccgtcagcgcctttgccttcaaccaggagtaaaagtggccgtagcctcttccggcgaggactggtgttaagggtcacgcaagatggcggcgcccagaggctgctgaggcgcggaacggaggatggcgctggtggcgttggtggctggggctcggctggggcggcggctgagcgggccggggctggggcgagggcactggacggcggccgggcgctcccggagccggcgcgaagcggcagaagccgaggcggaggtgcccgtggtccagtacgtgggcgagcgcgctgcccgcgccgatcgcgtcttcgtgtggggcttcagcttctcgggggcgctgggcgtgccttcctttgtggtgcccagctccgggcccgggccccgcgccggcgcccgaccgcgccgcaggatccagcccgtgccctatcgcctggagctggaccaaaagatttcatctgctgcttgcggctatggattcacactgctgtcctctaagactgcggatgttacgaaagtctgggggatgggactcaacaaagattctcagcttggatttcacaggagccggaaagataaaacgaggggctacgagtatgtgttggagccctcacccgtctccctgcctctggacagacctcaggagacacgggtgctgcaggtctcctgcggccgagctcactctcttgtgttgactgacagggaaggagtcttcagcatgggaaacaattcttatgggcaatgtggaagaaaggtggtcgaaaatgaaatttacagtgaaagtcacagagtccacaggatgcaggacttcgatggccaggtggtccaggtcgcctgtggtcaggatcatagtctgttcctgacggataaaggagaagtctattcttgtggatggggtgctgatgggcaaacaggtctgggtcactacaatatcaccagctcgcccaccaagctgggtggagacctggcgggagtgaacgttatccaagttgccacctacggtgattgctgcctggccgtgtccgccgacggaggactttttggttggggaaactcggagtacctgcagctggcctctgtcactgactccacacaggtgaatgtgccccgctgcttacacttctcaggagtggggaaggtgcgacaggctgcatgcggtggcacgggctgtgcagtgttaaacgatacatggccacagagctgagtcatcctagagcaaacctctggagtggagagcgaactacttcattcccctcccttagcctgggccagagagactccagctctgccttctccagccaaaaaatcaaaggcagatgggagaacagccttcagctttggataacgatgaaatatctggcaccactgatgaatattaaactttctataaccaaaaaaaaaaaaaaa

SEQ ID NO: 57687 - DNA, 858 bp, Homo Sapiens
atgatgcttcaacacccaggccaggtctctgcctcggaagtgagtgcttctgccatcgtcccctgcctgtcccctcctgggtcactggtgtttgaggattttgctaacctgacgccctttgtcaaggaagagctgaggtttgccatccagaacaagcacctctgccaccggatgtcctctgcgctggaatcagtcactgtcagcgacagacccctcggggtgtccatcacaaaagccgaggtagcccctgaagaagatgaaaggaaaaagaggcgacgagaaagaaataagattgcagctgcaaagtgccgaaacaagaagaaggagaagacggagtgcctgcagaaactcccaaggcccttttgggtccagaagacctgcatatgggctgttgactcatgcaaatgaggtatctgaactgcagcttcagtattagcagagccacaggccgcctctgtggcatcaccagggtttctctgaagaagagggtctgcattttcctaaacccagtgctgctctcccatctcccatcttcctctcgcagcttgatgagccccggtgtgtcccaggtacacccctgcatccaggcagcagcccaggccaccccctcctcactggcccttggctcctttcttgatgcctctgttgcttgtcccccaggagtcggagaagctggaaagtgtgaatgctgaactgaaggctcagattgaggagctcaagaacgagaagcagcatttgatatacatgctcaaccttcatcggcccacgtgtattgtccgggctcagaatgggaggactccagaagatgagagaaacctctttatccaacagataaaagaaggaacattgcagagctaa

SEQ ID NO: 57688 - DNA, 3068 bp, Homo Sapiens; identical to SEQ ID NO: 26253

SEQ ID NO: 57689 - DNA, 2976 bp, Homo Sapiens
ggaacagctggataatgtccaccccgagccgattcaagaaggacaaagagatcatagccgagtatgaaagtcaagtcaaagaaattcgagctcaactggtagaacaacaaaaatgcctggagcagcaaacggagatgcgagttcagcttctccaggatctgcaagatttcttccgaaaaaaagctgaaattgagacggaatattcccggaatctagagaagttagcagaaaggttcatggcaaaaacaagaagcactaaggatcatcaacaatacaagaaagaccagaacctgttgtctccagtgaactgctggtatttgctcctgaaccaagtaaggagagaaagcaaagaccatgcaaccttgagtgacatctatctgaacaatgtgattatgcggttcatgcagataagtgaggattctaccaggatgtttaaaaagagcaaagagattgcattccaacttcatgaggatttaatgaaggttcttaatgagctttatacggtgatgaaaacataccatatgtatcatgcagagagcatcagtgcagagagcaagctgaaagaggccgaaaaacaagaggaaaagcaaattgggagatctggtgatccagtcttccatattcgactagaggagagacatcaacggcgaagctctgtaaagaaaattgaaaaaatgaaagaaaaaagacaagcaaaatattcagaaaataagctaaaatcaattaaggcacggaacgaatatctcctaacacttgaagccaccaatgcctcagttttcaagtactatattcatgatctttctgatttaattgattgctgtgatcttggctaccatgcaagtctgaacagagccctaagaacatatctgtctgcggagtacaaccttgaaacctccagacatgagggcttagacattattgagaatgcagttgataatttagagcccaggagcgataagcagagattcatggagatgtaccctgctgcgttctgtccaccaatgaagtttgagtttcagtctcacatgggtgatgaggtgtgccaggtcagtgcccagcagccagtccaggcagagctcatgctcaggtaccaacagttgcagtcccgccttgccacgctcaaaatcgagaatgaagaggttaagaaaacgactgaagccaccttgcagacgatacaagatatggtcaccatcgaggactatgatgtttctgaatgcttccagcacagtcgttccacagaatctgtgaagtccactgtctctgaaacctacctgagtaaacccagcatcgccaagagaagagccaaccagcaggaaactgaacagttctacttcatgaaactcagagaatatttggaaggcagtaatctcatcacaaaacttcaagccaaacatgacttgctgcagaggaccctgggagaaggtgagttatccaaaatgtatgggaagatgacctggatgatacatcgtatcatgtatatattccagaaagagtatgaattgtatatttgtgctttaagaagcagaggacactctgtgtttagatttggttttgtttgtatatgtcatgattaagttctcctggcacgattttcttctaaagcatggtgctaaccttgaggaagcgtagtgaaatctagggagggctggaaagtcaataccgagctcctagggagggatcttcagagtgtggtgctcctgatcgtagaaaagtctggaaacactgcccctcccctacctgctgaccccccagtctcttcttccttcccttctcagacttctgcacccttccaaccccacccctgtttgttttaatgggcgagtatttgttgttccatctgttgcctgtttagactctggaaaccagttaaaccagtttgggtgatttttttctttcagcaggcattggctgtagttgagaaacaatcttaaagtataagtagattgctatgtctaataatagtaacaaaacaacagcaacagctaacacttgaaaggctttctctgtgccaggctttgttctgagttgtatattttactgtgcactaataatttctccgtttttacaaatgaggaaactgaggggaggcatgagaatacaggcaaaggggactgtataaatgttaatgtttctctttgtctttatgaaatttaaaaggaaaaaaataaatacaagccaagttcctgtcttaagtgcttcatagtctgtaactttatcttttattcacactagaccctgccagaagttagaaaaagtaaaagagaatgtggaagggagtgggaaacgagaggactgagttgtgtgagtaactcaggtcaaaaaagagattgcgcctcttagacctaaattcttgcctcccacaattctggaaccttccttaaccataaagtttctatcaccttatctcctggtttccaccaaagaactcatcatcctcagggaatgaccacatggagaaaggttatcatgacctaagaaccatgtctgacacagttaggatgaaaaggccaattacacctagaaggaaaaaaaaaaacaacgcaaactactaaaaagtgtcattaaaaaataaaataaccaaatacaatgtatgaaccttcacacactagattaaattagatactgaatcaaaaagcaaaagttatgaaagacattttaagaacaattagggaagttgaaatacagactgtatattaaataatattattgaattagtgttaattttcctagatatgataatggtattgtgattataaagaagaacattcttattcttaagaaatgcttgctaaagtgtcatgatgtctgcaacttaccttcaaatggttctaaaaaaaaaaagagggagagagaaagaaggtacagtcaatgtggcaaacattaacagccggaaaatctacatgaaggggataaggatgcttcctgtactgctcttttaactcttctgtaggtttgaactttaaaaaaaaaaaaaaa

SEQ ID NO: 57690 - DNA, 1089 bp, Homo Sapiens
ggccggcgactgagtaagatgaagatccagtttcagacatgagactcgttgggtgatcatttcattgagatcaacctgaatgaccaggtgtaaagtgcaagagtaatatgctatgactgaggcaactcaaattttttaattgccaatttctgtttcttttgattctacaaaagtaactatgtttccggtagcccctaaaccccaggattccagtcaaccatcagacagactcatgactgaaaaacagcaggaagaagcagaatgggaaagcataaatgtgctattgatgatgcatggcttaaaacctttgtctctagtcaaaagaacagatctcaaagatctcatcatttttgacaaacagtcatcacaaaggatgagacagaatttgaaattgttggtggaagaaacatcatgtcaacagaacatgatacaggagcttatagaaactaatcaacagcttagaaatgaacttcagctagagcaaagccgagcagccaatcaagaacaacgagctaatgacttggaacaaattatggaaagtgtgaaatccaaaattggtgaattggaggatgaatcactaaatagggcttgccaccaacagaataaaataaaagatcttcaaaaggagcagaaaactttacaggtgaagtgccagcattataagaaaaaacgaacggagcaagaagaaactattgcttctttgcaaatggaagtctgtagattaaaaaaggaggaagaagatcgcattgtcactcaaaacagagtgtttgcctatctgtgcaaaagagttcctcataccgtcttggatagacagtaattttgctacataaattgatatgtagctagattcattgttgtgtttgtttgtttgttttacctgatattatcttgggggtggttataactcttataaactagaaaagcctctctctcctcctcttctgcattgtttttccctgctcatcctgttcttttttttttttttttttgttctagaggtcctttgaagaatggaattgaacatttactaaaaataacactaaacttttaaataaattcataattaatcagaaaaaaaaaaaaaaaaaa

SEQ ID NO: 57691 - DNA, 3099 bp, Homo Sapiens
ccacgcgtccgcccacgcgtccgcccacgcgtccgcgcgctgcgagcctcggagacgccgtagaaggagacctgcttccgggactggaccaggcgcctgcgactcttctcagacgccgacgtgcacgagtgactactattaattctatttaaaatgggtgtaaagaagaagaaagaaatgcaagttgctgcgctgaccatttgccatcaggaccttgaaactttgaaatcttttgctgatgtggaagggaaaaatctagcttctttgctgttacattgtgtgcaactcacggatggagtgtcacaaatccattatattaaacagattgtgcctctgctggagaaagcagataaaaatggcatgtgtgatcccactattcaaagttgtttggatatcttagcaggcatttatctttctttgagtctaaagaatcccttgaagaaagtattggcaagctcactaaatagcctgcctgatttttttctacctgaggctatgcaccgttttacttctcgtcttcaggaagaattgaatactactgacttatactcttacaggaaagttactgacaatatttcttcctgtatggagaactttaacttgggtagagcaagtgttaataatctgcttaaaaatgtgcttcattttctgcagaagagtttaattgaaatcctggaagaaaatagaaaatgtgctggaaatcatattattcaaacacagttgatgaatgacttactggtaggcattagagtttcaatgatgttagtacagaaagtacaagatttccagggaaatctttggaagacttccgattctcccatatggcaaaatatgtgtggattgctgagtatttttaccaaggttttaagcgatgatgatctgttacagactgtacagagcacatctggattagctattattctttttattaagactatgtttcacccgtctgaaaagattcctcatttgattagcagtgtgctgcttcgttcagtggactgcaccagtgtccccgagtggtttatgagcagctgcaggagcctctgttgtggtgacatctctcagtcagctgtcttattcctctgtcaggggacacttgccatgttggactggcagaacggaagcatgggtcggagtggggaggccctgctcttggatactgcacatgttttgttcaccttgagttcacagattaaagagccaacgctggaaatgtttctgtctagaatcttagcatcctggactaattcagccatacaagtccttgaatcaagttccccgagcctaacggacagcctgaatgggaattcaagtatagttgggagacttttggaatatgtctatacccattgggaacatccattggatgctctgagacaccaaaccaaaatcatgttcaaaaaccttctccaaatgcaccggctcactgtggaaggtgcagatttcgtccctgatcctttctttgtggaattgactgagagtcttttacgattggaatggcatattaaaggaaagtacacgtgccttggttgtttggtagagtgcataggagttgaacatattttggctatagataaaactattccatctcaaatcttagaggtgatgggagaccagtcattggtaccttatgcaagtgacctcttggaaaccatgtttagaaatcataagagtcatttgaaatcccagactgctgagagttcttggattgaccagtggcatgagacttgggtttctcctctcctttttatattgtgtgaaggaaacttggatcaaaaatcttacgtgattgattattacttgccaaaattattaagttacagccctgaaagcttacagtacatggtaaagattcttcagacttctattgatgctaaaactggacaagagcaatctttcccatccttagggtcttgtaatagcaggggggctctgggagctttgatggcatgtctgcgaatagctagagctcatggacatcttcagtctgcaactgatacctgggagaacctcgtgtctgatgcaagaataaagcaaggcttaattcatcagcattgccaagtaaggatagatacattaggcttgctttgtgaaagtaatcggagcacagaaattgtttccatggaagaaatgcagtggattcagttctttattacatacaatcttaacagccagtctccaggagtgcggcaacagatctgttctcttcttaaaaagttgttttgtaggatacaggaaagttctcaggtactttataaattggagcagagtaaatccaaacgtgaaccagagaatgagttaaccaaacagcacccttctgtttctttacagcagtataagaatttcatgtcatccatttgtaacagtctttttgaagcattgtttcctggatcttcctactcgactagattttcagctttaaccattttaggttcaatagctgaagtttttcatgtcccagaaggcagaatttatacagtatatcagctgagtcatgatattgatgttggtcgtttccaaacactaatggaatgttttaccagcacttttgaagacgtgaaaattttagcatttgatcttctgatgaagttatcaaaaacagctgtacattttcaggattcggggaaactgcaaggcttatttcaggcagcattggagctcagcacaagcaccaaaccatacgactgtgtgacagcttcctacctgctgaacttcttaatctggcaggatgctctaccgtcatccttgtctgcctacttaactcagcaagttgcatgtgataatggagataggcctgctgctgtggtggaaaggaacacattaatgggtttgtattgatgtttgctcttatcaaaacgaatagcttagtctcagtattcatttggttagaatatctaatggttaaacatatattttgtggttttttatttaaaagtttatcagcatataagagcaccatgggttctcattatgcaaatgaacattttagtcagctataatacttttttctaaacagtggatttatgttgaataagtacatatacaaatatttattaataaagctcttttgaaatgagaaaaaacaaaaaaaaaaaaaaa

SEQ ID NO: 57692 - DNA, 2084 bp, Homo Sapiens
ggggagccgaggagcggagacacggacccagcagggtcacgcgggaggagactcgggacacccactcgctggctgccaccgggagcagaggggggctcggccgccccctcccacatcagtctccagacccttggggcttcagaggccgctcctaggctcctcggaggaggcgcgggtttcttcttttccggagagcaaactttcctcggagatgcctggcaggatgagccgcggcccccggagaggacgggacagcctctgatcgccgcctgcgtgccccgccactgcccatggccaggaggccccagggaacggacagcccgacctcttaggcgccgggaccctcaggctcagatcagtggccgaggccccagagtttgcaaactcagctctggagttcagcagcaacagcagcaggaaaaacctgcccctgctcccccctcccgccacctcccctctcctcttctcccctcacccagcaggcacccccggttcccgccaggccctcctgccatgtcggacccagacgtccccaggggctcggatgtccccgccatgtggcccccttgttccaggggtgcctgagccccttcaaggagccccaacccacccccaaccttggcccagccctgagccccagggaccatgagcgggggcaagaagaagagtagtttccaaatcaccagcgtcaccacggactatgagggccctgggagcccaggggcttcggatccccctaccccacagcccccaaccgggcccccgccccgcctgcccaatggggagcccagccccgatccggggggcaagggcaccccccggaatggctccccaccacctggggccccttcctcccgtttccgggtggtgaagctgccccacggcctgggagagccttatcgccgcggtcgctggacgtgtgtggatgtttatgagcgagacctggagccccacagcttcggcggactcctggagggaattcgaggggcctcagggggcgccgggggcagatctttggattccaggttggagctggccagcctcggcctgggcgcccccaccccaccgtcaggcctgtctcagggccccacctcctggctccgtccaccccccacctctcctggacctcaggcccgctccttcactgggggactgggccagctggtggtgcccagcaaagccaaggcagagaaacccccactgtcggcctcctcaccccagcagcgccccccagagcctgagaccggtgagagtgcgggcacatcccgggctgccacgcccctgccctctctgagggtggaagcggaggctgggggctcaggggccaggacccctccactgtcccggaggaaagctgtagacatgcggctgcggatggagttgggtgctccagaagagatggggcaggtgcccccacttgactctcgccccagctccccagccctctacttcacccacgatgccagcctggttcacaaatctccagaccccttcggagcagtagcagctcagaagttcagcctggcccactccatgttggccatcagtggtcacctagacagcgacgatgataggtaggtgggcttcgtggggtggtggggcgtggggttcaggttccccgcccagcacccggggtagctgtaagaaagtgcctggtaggcatccttcccccaggttgaacttggagaggacctcttagagaaacctggcctgggcatagccactgcacacagttgatttcggacccactccctctctgtggagagggctgggtgggactccctggctcagaactgtcaggtcacagacttttttagagtctgaagggagtcattgttgtcagattccagagctcttgcagatttagagatcatctggccaacccaggaacccactggcaaatgcatgctctagacagaatagcaaatcaggccggggcacagtggctcccgcctgtactcatagtgctttgggaggcccaggcaggaaaattgcttgaggccaggagttcaagaccaagccctggcaatgtagcgagacctcatctctaaaaagaaaaaaaaaaaaaaaaaaaaaaaaaaaaa

SEQ ID NO: 57693 - DNA, 1260 bp, Homo Sapiens
gtggaaagctgctgctgatggcattgtttttgtggcagcaagctgaatgacagatcctcactacaaagatacccctttggcccccgtgtaggcctccttggttcgggtgtttcaccatgccagcacagcgccatgagtcctggatgcatgctgctgtttgtgtttggctttgttggcggggcggtggtcattaattctgctatcttagtatctctctctgttttgctgcttgtgcacttttctatttctaccggtgtgccagctctgacgcagaacctaccaaggatactcagaaaagaacgccctatatcattaggaattttcccattacctgctggagatggattgcttacacctgatgctcagaaaggaggagagacccctggatctgagcaatggaaatttcaggaattaagtcaaccacgttctcataccagcctgaaggtcagcaatagtcctgaacctcagaaggctgtagaacaggaggtgagaatggtgcttcttaacattttgcaaaaagtatactaaagtgattaactattgattacttcctcaactgctattctcaagacatcagatgctcagcttggaagactattgttgtaattcactgaaatataaaagaaaattatttccactgtagtggttgtcagggctttactgcaatctgtaatttattccttccccaaagtaagcatttttaaataaaggaaagaaaatataagtaaattctgtgaaattcagcctgtttgcatttatccagctctatgtaatggtatactttccagaaataccttcttcagggcataatgtatgtaacttgtatttgtcctgaatgtggcctagtgtgtcatcttacagtggactgcttccttagtttaatagagttcttcatctccagtcagggcaccatccagctttattcatcaaacatctgttaagagcctactacaggccaggtgtggtggctcatgcctgaaatcccagcactctgcccaggcaggcggatcacttggtcaggagtaggagttcaagaccagcatggccagtatggtgaaatcttgtctctactaaaaatacaaaaatcagccaggcatggtggcagacacctgtaatcccaggtacttaggagtctgaggcaggagaattgcttgaacccgggaggtggaggttgcagtgagctaagatggtgccactgccttccagcctgggcaacacagcgagactccatctcaaaaaaaaaaaaaaaaaaaaaaaaaa

SEQ ID NO: 57694 - DNA, 956 bp, Homo Sapiens
aggatgcacccggcaggcttggcggcggcggctgcggggacgccccggctgccctcgaagcggaggatccctgtgtcccagccgggcatggccgacccccaccagcttttcgatgacacaagttcagcccagagccggggctatggggcccagcgggcacctggtggcctgagttatcctgcagcctctcccacgccccatgcagccttcctggctgacccggtgtccaacatggccatggcctatgggagcagcctggccgcgcagggcaaggagctggtggataagaacatcgaccgcttcatccccatcaccaagctcaagtattactttgctgtggacaccatgtatgtgggcagaaagctgggcctgctgttcttcccctacctacaccaggactgggaagtgcagtaccaacaggacaccccggtggccccccgctttgacgtcaatgccccggacctctacattccagcaatggctttcatcacctacgttttggtggctggtcttgcgctggggacccaggataggttctccccagacctcctggggctgcaagcgagctcagccctggcctggctgaccctggaggtgctggccatcctgctcagcctctatctggtcactgtcaacaccgacctcaccaccatcgacctggtggccttcttgggctacaaatatgtcgggatgattggcggggtcctcatgggcctgctcttcgggaagattggctactacctggtgctgggctggtgctgcgtagccatctttgtgttcatgtttccccttttgccgggcgcggtggctcatgcttgtaatcccagcactttgggaggccgaggcggtcggatcacgaggtcaggagatcaagaccatcctggctaacacggtgaaaccccatctctactaaaaaaaaaaaaaaaaaaaaaaaaaaaaaaaaaaaaaaaaaaaaa

SEQ ID NO: 57695 - DNA, 1930 bp, Homo Sapiens
aggctctccaccaaggagggactgggccagagtcctcgcgagggcacgcggcgtggtccccagagctaggccggagcgcgggccgctgacgccactgtcgggtgaggctcggtgcatccatggggagccgccctccgtgcggggcgacctcgtctgcgcggcgggcgtgccagttccccgcacccatggcagcggccagagagccggagttgccgcaggaagcccccgccacggaacccgcgcccccgccggcctgccgcttcttcctggaaggccgctgccgcttcggcgcccgctgccgccagccccaccctggggcgccggcgccgcctggccgcgaggcgcagccggaggccggggccaagaagccgccgctgcgcacagccgcggacgtcatccagcgcatccgctgggacccgcgcctcgaccccgccgacttctcggtgggctacgtcgaccgctttctgggtgtgcgcgaggagcccttcagcgccttttgctgggaccagccgctggcggcgctcgggccgggcgtgctggcagtgccccagcaccgcgtgcgcttcttccgcttccatggccgccttgtgtgggaccgcgcctcgcgcaccgacctcgtctttggctctggctcggcggcgggacgcgggcccaccatcctggacgcaccgaacaccgagggcgcccacggggcagagggtgccgagtggacactggcggggacaggtcaggaggcccaggctgcccccaagcgagggagcacaaggccgctctgcacagggcaccaggaaccaggcgtggaggaacccggagagctggaggcggcccaggagagggcgctgggcacagctgctgatttgggaacactggccccaagaggacgcctcgccggagtgactgaggaggcactgaagccaacagcagccaccaggaccacattgctggggggcaaggaagcacaggccctgggagtcccggggggctccgctgagacgacagaagccgagtggggtcctgcggcctggcccgaggacaaaagggcccgccttagtgttgcagccccttgccaaccgcgccccacacattttgtggccctcatggtgaccgagcctgggctacaagcagaagtgaccaaggcccaggaatacctggtccacgtggccccacactgcgccaacttcctagtgccctctcagaacctacacctgaccctggccctgctgcgactggcaggcgctggggaggaggccgctgccattggagctctgagacgggccctcttggccccggggctaaatgcaccccctcggctgagctttagaaagctggtcctcctgggcccgcatgtgctgtgtgccccaccctctcccacactggaaagcatggcacaagtgctgagccagaggctggaagccgaggggctgagtacactacagtctccagggcagctgcacccccacctcaccgtggccaaggtgccccatggttcccaggtccacctccccaagctggagttcaccctcagccaggaagtggggtgccagcccctgcagacactctggctgtgccgtatagggaggacaggggggcctttccagcccctggctgagatccgcctggagtgacacccccagacctctggaggagacaatggatgcaaacagcccacacaggaaagacaaagcaggagcgtgcacgctctctctttctctctttaattttggtttctctcaagcttccaaatggtgctcagtgctccaaggaaaggaaggaaggaaggaaaaggaggggagaggaggggaaggggaggcagaggaggaacatctggaaaaaaagcagcctgacagtccagctgtttgcaaactcatagcacatcctccagttacatggcagaagagggagggagggagggccaaaaaaaaaaaaaaaa

SEQ ID NO: 57696 - DNA, 1879 bp, Homo Sapiens
gggggcgctgaggtgctgggacagccatggtttcagacgaagatgaattgaatcttctggttattgtagttgatgccaacccaatttggtggggaaagcaagcattaaaggaatctcagttcactttatccaaatgcatagatgccgtgatggtgctgggaaattcgcatttattcatgaatcgttccaacaaacttgctgtgatagcaagtcacattcaagaaagccgattcttatatcctggaaagaatggcagacttggagacttcttcggagaccctggcaaccctcctgaatttaatccctctgggagtaaagatggaaaatacgaacttttaacctcagcaaatgaagttattgttgaagagattaaagatctaatgaccaaaagtgacataaagggtcaacatacagaaactttgctggcaggatccctggccaaagccctttgctacattcatagaatgaacaaggaagttaaagacaatcaggaaatgaaatcaaggatattggtgattaaggctgcagaagacagtgcgttgcagtatatgaacttcatgaatgtcatctttgcagcacagaaacagaatattttgattgatgcctgtgttttagactccgactcagggctcctccaacaggcttgtgacatcacgggaggactgtacctgaaggtgcctcagatgccttctcttctgcagtatttgctgtgggtgtttcttcccgatcaagatcagagatctcagttaatcctcccacccccggttcatgttgactacagggctgcttgcttctgtcatcgaaatctcattgaaattggttatgtctgttctgtgtgtttgtcaatattctgcaatttcagccccatttgtactacgtgcgagacagcctttaaaatttctctgcctccagtgctgaaagccaagaaaaagaaactgaaagtgtctgcctgaggataaaatattttccccatcttttagagctgttaatagaaattatatagcagattctttgttgggaagactgaaaaaaataaagataggtataggataatttttaatatggtgaccttacagaaaatatttcccaaacatccttttcatcctgtgcttctggaggactgatttgtttgagggaatcattctatgcattatatcctaaaatattctatgactggtttctgtccatgtttgtggctttcatttttttaatgggatgactattagtcaaagtcagcttgtcatgactcatcataggctttctaacctactccctgaatccgggtcctcattgtgaaatgcatgccatacgaaatttgaacgtagctttggaaaaagggactatttgtggagtaatggcattaatcaacatagaacatcttatttgaatcaacagttaacttcagtagtcatgtgaataaaattcttattgtctaaattgagacagcctcagatatttgcagatatttactttttgtctgatatcagtacatatttggacaaagtgctgggattacaggcgtgagccaccgcacccggcccttgtttgtttttttaagtagagacaaggtctcactacattgcccaggttggtctcaaactcctgagctcaagcagtcttcccaccttggcctcctaaagtgtggaaattatagcatgaaccactgtcaggctcttttgtcagtcctatcaacctctaacatcctcgcaccagacaggacaggtgtctgtattgaaactttattacaaaattataaagcagagctctgtaacaaaataatacacatttgggtttgctttaacctccaagtaagtctgagaaaatcttaataaaagccacttgaagtaataaaaaaaaaaaaaaaaaaaaaaaaaaaaaa

SEQ ID NO: 57697 - DNA, 3984 bp, Homo Sapiens
gggagcggcggcggccgctgcggccgcccgggcgtttgaaaagcggctacgcaggcggcaaaaggtcctcgggtggcgggcttgtctctgcttgcagactggcagggctgcagcgtggctttttccttgagtcggggcacagttaggatctgggctggcggcccgaggcagaggagccgggcgcgctgcagcagacggcggtgggacctggctgcggagcggggtccgggcatcagggaccgggggcgggcagtgggggtcccgccgggggtcccggattacccgcgactcaactggacctcacttccccccagccgccttcgcccccggaccgctcaccgcaaccatggtctccaaatccgaccaattgctcatcgtcgtgtccatcctagaaggtcggcatttccccaaacgtccaaagcatatgcttgtagtggaagcaaagtttgatggagaacagttggctactgatcctgtggaccacactgaccagccagaatttgctactgagttagcttgggaaattgacaggaaagcgcttcatcagcacaggctacagcgtactcctatcaaactccaatgttttgccttggatcctgtaacttcagccaaggaaaccataggttacatcgttctggatttaagaaccgctcaagaaacaaagcaggcaccaaaatggtaccagttgctgagtaataaatacaccaaattcaagtctgagatacagataagtattgctttggaaaccgatacaaagccaccagtggatagctttaaagcaaagggggctccccctcgagatggaaaagtacctgccatcctggctggacttgaccccagggacattgtggctgtgctgaatgaagagggaggctaccatcagattggaccagcagaatactgtactgactcctttattatgtcagtgaccatagcatttgctacccagttggaacagttaattccatgtaccatgaaacttccagaaagacagcctgagtttttcttttactactctttactgggaaatgatgttacaaatgaacccttcaatgatttaatcaacccaaactttgagccagagagagcatcagttcgcatccgtagcagtgtagaaattcttcgtgtttacctggctcttcagtctaaactgcagattcacctctgctgtggagaccagtcacttggaagtacagaaatacctttaactggattacttaaaaagggcagtacagaaatcaaccagcacccagtcacagtcgaaggtgcttttacccttgaccctccaaacagagccaaacagaagcttgcacctattcctgtggagctagccccaactgtgggagtgtctgtggctctgcagagagaaggcatagactcccaggatgcattttggtattcagctctggatatcatatttcctctgttcatcttcctttttctggtcctagatgctataaggaaatttgcaaattacgaagaaaaatagactaggaatatccaaactgggaaaggaagcttatatttttaaaaaacaatgccaagttttttgcttaattatgaaggaaagttctttgcaaattatactttatttaaaaattgtttttagtctttaattgaattaaagacccagaatgaacatgagccagagcattcaaagaagaaagttttaacccccataaaggagaagacacttactgggccaaaatcaccaacagtgtcccctgttccatctcacaaccagtcacctccaacaaaagatgatgcaacagaaagtgaagtggaaagtttacagtatgataaggacaccaaaccaaatccaaaagccagttcttctgtacctgcttcactggcccagctagtgactacatccaatgcttcagaagtagcttcaggacagaagattgctgtaccagcaacatcacatcatttttgcttttcaatagacttaaggagtatacatgccttggagattggttttccaatcaactgtatattaaggtgtgatttgattttgtttcaaagtattattttctgaagagaaaggactttcctgtgtttggggaattgcagagagaaatgtcaccaaagaagttataacatttgttaaatcagtggactaaaagggggtactcatatccattctttggaagtgcagctcctattatgactaatcctcctgtagaagttcggaaaaacatggaagtttttcttccccagtcttactgtgcatttgattttgcaactatgcctcatcagctgcaagacaccttcttaaggattccattactggttgaactatggcacaaggataaaatgagtaaagatttacttctgggaattgcgagaatccagctttctaacatcttgtcttcagaaaaaactcgttttttaggttctaatggtgaacagtgttggcgtcaaacttacagtgaaagtgtgcctgttatagcagcacaaggatcaaataacaggatagcagatctttcttacacagtgactctagaagattatggactagtaaaaatgcgtgagatttttatctctgattcatctcagggtgtatctgccgtacagcaaaagccgtcttctcttcctccagcaccttgtccttcagagatccagacagagcctcgtgaaacgttagaatacaaagcagcacttgagctagaaatgtggaaggagatgcaagaagatatatttgaaaatcagctgaagcagaaagaactggctcatatgcaggctcttgcagaggaatggaagaaaagggaccgagaaagagaatcactagtaaagaaaaaggtggctgaatatactattctagaaggaaaacttcaaaaaactctaattgacttggagaagcgagagcagcagcttgctagtgtggaatcagagcttcaaagagaaaaaaaggaactgcaatcagaacgtcagcggaacctgcaagaactgcaggactctatccgtagggccaaagaggactgtattcaccaagtagaactagaaaggttaaaaatcaaacagctcgaagaggataaacaccgccttcagcaacagcttaatgatgctgaaaataagtataagattttggaaaaagagttccaacagttcaaggaccagcaaaacaacaaaccagaaatccgtctacagtctgaaataaatcttctcaccttggaaaaggttgaacttgaaagaaagttggaatctgcaactaagtctaaactgcattacaagcagcagtggggacgagctttgaaagaacttgccagacttaaacagccaaagaagacagtttggtgtatttttgtccagatatgtttttctttttaaataactttaaaatgaaatatacatttcaaagaaggttcttctactctttccacctgcctcctggtttaagaaacagagcattatgatgaatgctttggaagccctctgtgtccctttctcaactgtgtcttctctttccagagagggagcaagaaagtcaaatggctcgtcttaaaaaacagcaggaagaattggaacagatgagactacgttaccttgtcgctgaggaaaaagatacagtaaaaaccgagcgacaagaattgttggatataagaaatgaattgaacaggttaaggcaacaagagcaaaaacaataccaggattccacagagattgcaagtggaaaaaaggatggcccccatggcagtgtattggaagaaggtttggacgattatttgactcgcctgatagaagaaagggatactttgatgagaacgggtgtgtataatcacgaggatcgaataataagtgaactcgaccgacagatcagagagattttggcaaaaagcaatgccagtaattaataacatttggaaaagctttatagagactctaagtctaaattttaatttctttgtaaaaccctcaaaagtgaggaaaatggatgttttaaaatggtattttcaattttttataagcaaaaaaaaaaaaaaa

SEQ ID NO: 57698 - DNA, 2435 bp, Homo Sapiens
ggcggaagcgctatccgagcaggatgcggttcgtggttgccttggtcctcctgaacgtcgcagcggcgggagccgtgccgctcttggccaccgaaagcgtcaagcaagaagaagctggagtacggccttctgcaggaaacgtctccacccaccccagcttgagccaacggcctggaggctctaccaagtcgcatccggagccgcagactccaaaagacagccctagcaagtcgagtgcggaggcgcagaccccagaagacacccccaacaagtcgggtgcggaggcaaagacccaaaaagacagctccaacaagtcgggtgcggaggcaaagacccaaaaaggcagcactagcaagtcgggttcggaggcgcagaccacaaaagacagcactagtaagtcgcatccggagctgcagactccaaaagacagcactggcaaatcgggtgcggaggcgcagaccccagaagacagccccaacaggtcgggtgcggaggcaaagacccaaaaagacagccctagcaagtcaggttcggaggcgcagaccacaaaagatgtccctaataagtcgggtgcggacggccagaccccaaaagacggctccagcaagtcgggtgcggaggatcagaccccaaaagacgtccctaacaagtcgggtgcggagaagcagactccaaaagacggctctaacaagtccggtgcagaggagcagggcccaatagacgggcccagcaagtcgggtgcggaggagcagacctcaaaagacagccctaacaaggtggttccagagcagccttcccggaaagaccattccaagcccatctccaacccttctgataacaaggagctccccaaggctgacacaaaccagcttgctgacaaagggaagctttctcctcatgctttcaaaaccgaatctggggaggaaactgacctcatttctcccccgcaggaggaagttaagtcttcagagcctactgaggatgtggagcccaaagaggctgaagatgatgatacaggacccgaggagggctcaccgcccaaagaagagaaagaaaagatgtccggttctgcctccagtgagaaccgtgaagggacactttcggattccacgggtagcgagaaggatgacctttatccgaacggttctggaaatggcagcgcggagagcagccacttctttgcatatctggtgactgcagccattcttgtggctgtcctctatatcgctcatcacaacaagcggaagatcattgcttttgtcctggaaggaaaaagatctaaagtcacccggcggccaaaggccagtgactaccaacgtttggaccagaaggtaaggaaggaggagccaggtccatgggagggataggagggataggcaacgtcagatggacccagtagtgggcttgcatttgccatgaagcagcagtggctgattctggggatgcggttgctgttgctgttgcattcgccctttttagacaacaaactagaaacatctagatacacatatctgtgacgttagagctagcagagaccttggaatactctacagcagctacctcccttcacagatgaggaaataggcccacgcagaaacactcttttttttttttttccgctaagtttctactgcaagttagtggcaaactcaggacctgatagcaactccctagtctcccagtcctgagctttctgcattctgccagcgctccataaactttaataggcatttgaatcaccttggggaattttgataaaaagcattatctgattcattagatgtggggtggagcctatatttctacattcttttttttttttttggagatggagttttgctcttgttgcccaggctggagtgcagtggtgcaatctcggctcactgcaacctctgctgcctgggttcaggcgattcttgtgcctcagcctcctaagtagctgggattacaggcatgtgccacacacctggctaatttttgtatttttagtagagatggggtttcaacatgttggccaggttggtctcgaactcctgacctcaagtgatccacctgcctgacctcaagtgatccacctgcctcggcctcccaaagtgctgggattacaggcgtgagccaccacgcccagccaccttttctatgtttagatacataaacactcaccactgtgtcacagtcacctacagtattcagtacagtagcatatgctgtacaggcttgtagcctaggagcaataggctataccatatagcctaggtgtgtacaccatctaggtttttctaactacactctatgatgttcacacaataaaattgcccaacgaaaaaaaaaaaaaaaaaaaaaaaaaaaaaaaaaaaaaaaaaaaaaaaaaaaaaaaaaaaaaaaaaaaaaaaaaaaaaaaaaaaaaaaaaaaaaaaaaaaaaaaaaaaaaaaaa

SEQ ID NO: 57699 - DNA, 1351 bp, Homo Sapiens
ggcacgaggcgaagtctcctgcggatgccgcccgctcccgagcttctgtcaggggagccgggcgtgcggaggcggctgaggaggcgggaaggcggcagtggttgaaggggtgattgctgactagcggggagggagtgggcagcgatggtgatggcggcgaagaagggcccgggcccgggcggcggggtcagcgggggcaaggcggaggcggaggcggcctcggaggtgtggtgccgtcgggtgcgggagctgggtggctgcagccaggccgggaaccgccactgcttcgagtgcgcccagcgcggggtcacctacgtggatatcaccgtgggcagcttcgtgtgcaccacctgctccggcctcctgagagggctgaacccccctcatcgtgtcaagtcaatctccatgacaactttcactgagcctgaagtagtattcctgcaatcccgtggaaatgaggtttgccggaagatttggttgggtctgtttgatgctcggacatctttagtaccagattccagggatcctcagaaagtgaaggagtttctccaggaaaaatatgagaagaagagatggccagacaccttcccaaggaggctttgccaactttgatgcctttagcagtggccccagctcttctgtgtttggaagcctccctccagctggtcaagcctcgttccaggcccagccaactcctgcaggtaaactctgccccactggcttcctttctcttccaaccgtgtccatttgttcatgtctataaatcaccattcatatcctcactatcctaaagaactgctcaaagcagcaaagcacaaagagaagcagctccaggagaggatgagcgtgtctgacacattcttgtcagggagagggggctctactgttctgctttttcatgaaaggaaaatgactaagattgcagcaggagctgtgtgggttatacactaggaaacttttcactaggaagtatggaagacctgagtcctagaaaaattgaaaatggacgtgactttttctctaaggtgctcttgtctgcatagtacgctgtcccaaagggtcaagggtcaaggtagtctccagaagtcctcatccatccctctaagaccaaaggcctgtaaactctatgttgctgccagccacaatggctcacgcctgcaatcctaacactttgggaggccgaggtgggaggatcgcttgagcccaggagtttgaggctgtagtgagtgattattgtgccattgcactccagtctgggtgacagagtgagaccccatctcaaaacaaacgaacgaacaaacaaaaccaaataaactatgttatttagccattgaaaaaaaaaaaaaaaaaa

SEQ ID NO: 57700 - DNA, 1923 bp, Homo Sapiens
gagacttgcaggcagcaaacacggtgcgagcgaacaggagtgggggggaaattaaaaaaagctaaacgtggagcagccgatcggggaccgagaaggggaatcgatgcaaggagcacaataaaacaaaagctacttcggaacaaacagcatttaaaaatccacgactcaagataactgaaacctaaaataaaacctgctcatgcaccatggtttttcaaactcggtacccttcatggattattttatgctacatctggctgctccgctttgcacacacaggggaggcgcaggctgcgaaggaagtactactgctggattctaaagcacaacaaacagagttggagtggatttcctctccacccaatgggtgggaagaaattagtggtttggatgagaactataccccgatacgaacataccaggtgtgccaagtcatggagcccaaccaaaacaactggctgcggactaactggatttccaaaggcaatgcacaaaggatttttgtagaattgaaattcaccctgagggattgtaacagtcttcctggagtactgggaacttgcaaggaaacatttaatttgtactattatgaaacagactatgacactggcaggaatgtaagagaaaacctctatgtaaaaatagacaccattgctgcagatgaaagttttacccaaggtgaccttggtgaaagaaagatgaagcttaacactgaggtgagagagattggacctttgtccaaaaagggattctatcttgcctttcaggatgtaggggcttgcatagctttggtttctgtcaaagtgtactacaagaagtgctggtccattattgagaacttagctatctttccagatacagtgactggttcagaattttcctctttagtcgaggttcgagggacatgtgtcagcagtgcagaggaagaagcggaaaacgcccccaggatgcactgcagtgcagaaggagaatggttagtgcccattggaaaatgtatctgcaaagcaggctaccagcaaaaaggagacacttgtgaatgtaagtaatgtgtcctattaaaactctactttgcctttttaaatttcagtatcagacattttaaactttaatagttatttgaatacgtgaatctgctctgtaccagaagcgcaattcagtagatcttaaacaaagtcaccgttgaacttagtgattgccctacagtagcatctgcactaagtgtatgtaatcaatataggtgataatgaaatttgttactaaaatttaatgtgtcctatgcttaacatggaagtcaatagttgcacgttgggctatggagtttagagaggagtctgggtagttggacatatagcctggcaagactgaggtgacatttaacaggatttaatgagatgccattcctcctgtttttaaacccatattgtctgggcccttgagtagcagtaaataggaggttaagagggctgtgaataagagctctagtgacaggcagggcataaacgaatacatttacaaacttttagaattatcttatataaatactataactttaatacaaaattttcaaatttcacttacaaaatctctgtggttacttctgagaaaggtgtgtgtttttttttttttttttggactaagtaccaaaatgaccacatttttgtgaaagtgggccaaagtaaagttttaattattatagtacaccaattgcatgttttgaaacaatcatgtatgaattagtaaacttttttctttgttttataaaaccgttttttttctttcctagcattatgtggctaaatatttaaaactatgtcatatggaccttcaagattgatagatattctgtttctaggtttcatgaaaataaattataaagttatgttaaaaaaaaaaaaaaaaaaaaaaaaaaaaaaaaaaaaaaag

SEQ ID NO: 57701 - DNA, 2782 bp, Homo Sapiens
ggtctatgctccgcggtcgcgggccgccagcctccagccggccagccgcgaggggtgcgcagagggaggcggggcggaaaggcgagaggtgtctcctccaccggagccaggggagacccgagcaagctccgtgacagcacgtcggccgccatgtcgccgagtggggctggaaacagacccggcgcccagcggtagccctccttgcgcctccgattcccagacatggaaggtctttaatgtaactttaaatggttcaccaaaggatgctctaatggatgacagcgatactcctacatattatctgcaaatagaaccacaagatggatgtcatcctggtgacagcgtggaaaggagtgtgacctgtctgccttctgcatcagatgaaaatgaaaatcagcttgacggggacgggcatgagcatctgaccagcagtgacagtgcgatgggaaagccccaagtgtctgagcaggacagtctcaataataatgaaagctgcacattgagctgcgaggtggctgcaggtgagaacttgcaaaacaccctttgtgaagcctccagagatgaacaggccttcttgggaaaggacaaaaaaattcctggaaaaagaagtccaagaagcaaaaaagggactgctaagaagataccaccaggacttttttcaggagatattgcacctttaatgcaagaaaaagtactaagcgcagtcacatatgctgttgatgatgaagaagctgctgaagtaaatgctaatgagcagccagaggcgccaaagcttgttctgcagtctctgttttcacttatacgaggtgaagttgagcagttggattcaagagcacttcccctttgccttcatcagatagcagaatcctatttccaggaggaggactatgagaaagcaatgaaattcattcagctagaacgattgtatcatgagcaattgctcgcaaatctttctgccattcaagaacagtggggtaagtacagaccaacatggaatgtggaattagcagtaatccaacaagtcactatctacaaaattaacatatttgacctggttttataaatcagaaaatagatgtttccataaacaagttaatgttgcaaagaaagtagcatttttaccacaagtctattatattgtgagaagacttttttctttgtattttgctcttcatatcaatgccaagaaaagaatacttgcaactatttgcatttttcctaatcacatttcatgccctactggctaatttagtctctaggatgatatttacttatattgaaaagtaataagttagttatttctaactgttgggttgtttgaaaagataattttgcatgcaaatctttatgagtggtgctagttaactgtttgtttgtttttttgctcctaaatatgttttataagagccagtgactaacaaatactttaaatttagaaacaaaatggaaaactgtgcaaccacatacagttacggctctaaggaattcagaaaagggatttaatggtgaagattttgaacggcttacgaaaatttgtgcaacacatcaagatcctcttttatccaaacataagatagcagctgtggagaagtcccaggaaaggaaatgctccacgcagttactagtgtctgaagatccaaaggaaggaggagctaccaccaaagagtcagagagtaaaacttgtctcggcacagagtcaagtaaagaaagccaacatacagtggagcccctggggagcagtccctgctgtcatcagatggacgtgcaaacagattcccgaagcctttcggtaactgcaggaaaggaccacatggaggagctgctctgcagcgctgaagccacgttagcgctccacacccagtcctccgagacagcagggagcccgtctgggccagactcttctgaggatgcttgtgaggatgacagtcgcttgcagctggctcaaacagaggcctgccaggatgtggccagaatagagggcattgctgaagaccctaaggtgtttctttccagcaagtcaaagacagagccgttgatttcaccaggctgtgaccgtatacctcctgcattgatttctgagggtaaatattcacaggctcagaggaaagaactccgtttgccacttcgggatgcttctgaggcgttgcccacagaccaacttgagaacaatgaattaaatgagctgcagcagcctgatcttacagacagtgatggaaaatcaccacaggcgcaggctgactcagacggttctgagaatgtgctctgtggaaataatcaaatatctgacttaggcatactgcttccagaggtgtgtatggccccagaggaaaagggagataaagacgaccaactcaacaaagaaacagaagactatttgaacagccttttagaaggatgtttaaaagatactgaagattccctttcctatgaagataaccaagacgacgactccgatctccttcaagatctctctcctgaagaagcatcctatagtctccaggagaatctgccttctgatgagagctgtctttctcttgatgatcttgccaaaaggatagagattgcagaggtaaatcagagatgaagtacaattaaaagtaaaatggcatttaaaaaacatatatatgtattaaatattgccttgtttttgtaagttttcccttgtctcaaacatgagggaaaattctagttaacgtaagcttttaattattagtagtttttacatttgtatgtattgaataaaatgacttttaatcattgcaatgttaaaaaaaaaaaaaaa

SEQ ID NO: 57702 - DNA, 1154 bp, Homo Sapiens
aatcaagaagttggcgtgcagctgggagagctagactaagttggtcatgatgcagaagctactcaaatgcagtcggcttgtcctggctcttgccctcatcctggttctggaatcctcagttcaaggtaagactcaggagtcttgttccccagccatcttctctgtaagccctgtggtccatgcaagtcattatattcattttaaggcatagaatgtataatattgtgagaaaggaggcaaagaagaaggatttggggtcgctgaaccctttaatatgagttctgttaagtttggtaccaagaaaaattaaactctgtggcgtgtgcagtcttgtaaactcttacaatgattgaaatgtgctattttgggatgaaaatgtgaggtttataaattttaaaagctcaaaaaaggaatctagaaaatgactcctgtgcctgttgcatggaggagatggcacctttgactgttggggggtgtctgcctacccctaagtgtctacatcagccccaagttttagtgcgctgtgacggtgtcattgttattttaacactgggagacgttatattccaattggggtgaatctgactgtgtgtattttcttttctttttttttttttaaagataaacttggttcttactgaaaactcaattatggttagacatagttcatgtaaaacctctcagattttaaagagaaggccaaataatttggtatttgtgctcttgctcagagaagcatcatattcggaaatatcttcctaggtttatctaccatttagtgttgtttagtcagactgaaacaacttaaaacctgtaatgactaagacaatgaaaatgataggcttgtaagaaaaatacaatttgttattctttggcaaataaggaatcatgtctaaataagacggaggtcatggcttgatagagagatggctgaacctatagtagaaaaacactaggttccgccaaatggtaagggaaatgttgagtcacaatgacacacatgtcctagatttgtttcgtcaaagcgacttttggttgtcatgatcttacttccggtggaggttgcagtgagctgagatcatgccattgcactccaggctaggcaacagagtgcaactccgtcccaaaaaaaaaaaaaaaaaaaaaaaaaaaaa

SEQ ID NO: 57703 - DNA, 3567 bp, Homo Sapiens
gcgcggtgctatcggacagagcctggcgagcgcaagcggcgcggggagccagcggggctgagcgcggccagggtctgaacccagatttcccagactagctaccactccgcttgcccacgccccgggagctcgcggcgcctggcggtcagcgaccagacgtccggggccgctgcgctcctggcccgcgaggcgtgacactgtctcggctacagacccagagggagcacactgccaggatgggagctgctgggaggcaggacttcctcttcaaggccatgctgaccatcagctggctcactctgacctgcttccctggggccacatccacagtggctgctgggtgccctgaccagagccctgagttgcaaccctggaaccctggccatgaccaagaccaccatgtgcatatcggccagggcaagacactgctgctcacctcttctgccacggtctattccatccacatctcagagggaggcaagctggtcattaaagaccacgacgagccgattgttttgcgaacccggcacatcctgattgacaacggaggagagctgcatgctgggagtgccctctgccctttccagggcaatttcaccatcattttgtatggaagggctgatgaaggtattcagccggatccttactatggtctgaagtacattggggttggtaaaggaggcgctcttgagttgcatggacagaaaaagctctcctggacatttctgaacaagacccttcacccaggtggcatggcagaaggaggctatttttttgaaaggagctggggccaccgtggagttattgttcatgtcatcgaccccaaatcaggcacagtcatccattctgaccggtttgacacctatagatccaagaaagagagtgaacgtctggtccagtatttgaacgcggtgcccgatggcaggatcctttctgttgcagtgaatgatgaaggttctcgaaatctggatgacatggccaggaaggcgatgaccaaattgggaagcaaacacttcctgcaccttggatttagacacccttggagttttctaactgtgaaaggaaatccatcatcttcagtggaagaccatattgaatatcatggacatcgaggctctgctgctgcccgggtattcaaattgttccagacagagcatggcgaatatttcaatgtttctttgtccagtgagtgggttcaagacgtggagtggacggagtggttcgatcatgataaagtatctcagactaaaggtggggagaaaatttcagacctctggaaagctcacccaggaaaaatatgcaatcgtcccattgatatacaggccactacaatggatggagttaacctcagcaccgaggttgtctacaaaaaaggccaggattataggtttgcttgctacgaccggggcagagcctgccggagctaccgtgtacggttcctctgtgggaagcctgtgaggcccaaactcacagtcaccattgacaccaatgtgaacagcaccattctgaacttggaggataatgtacagtcatggaaacctggagataccctggtcattgccagtactgattactccatgtaccaggcagaagagttccaggtgcttccctgcagatcctgcgcccccaaccaggtcaaagtggcagggaaaccaatgtacctgcacatcggggaggagatagacggcgtggacatgcgggcggaggttgggcttctgagccggaacatcatagtgatgggggagatggaggacaaatgctacccctacagaaaccacatctgcaatttctttgacttcgatacctttgggggccacatcaagtttgctctgggatttaaggcagcacacttggagggcacggagctgaagcatatgggacagcagctggtgggtcagtacccgattcacttccacctggccggtgatgtagacgaaaggggaggttatgacccacccacatacatcagggacctctccatccatcatacattctctcgctgcgtcacagtccatggctccaatggcttgttgatcaaggacgttgtgggctataactctttgggccactgcttcttcacggaagatgggccggaggaacgcaacacttttgaccactgtcttggcctccttgtcaagtctggaaccctcctcccctcggaccgtgacagcaagatgtgcaagatgatcacagaggactcctacccagggtacatccccaagcccaggcaagactgcaatgctgtgtccaccttctggatggccaatcccaacaacaacctcatcaactgtgccgctgcaggatctgaggaaactggattttggtttatttttcaccacgtaccaacgggcccctccgtgggaatgtactccccaggttattcagagcacattccactgggaaaattctataacaaccgagcacattccaactaccgggctggcatgatcatagacaacggagtcaaaaccaccgaggcctctgccaaggacaagcggccgttcctctcaatcatctctgccagatacagccctcaccaggacgccgacccgctgaagccccgggagccggccatcatcagacacttcattgcctacaagaaccaggaccacggggcctggctgcgcggcggggatgtgtggctggacagctgccggtttgctgacaatggcattggcctgaccctggccagtggtggaaccttcccgtatgacgacggctccaagcaagagataaagaacagcttgtttgttggcgagagtggcaacgtggggacggaaatgatggacaataggatctggggccctggcggcttggaccatagcggaaggaccctccctataggccagaattttccaattagaggaattcagttatatgatggccccatcaacatccaaaactgcactttccgaaagtttgtggccctggagggccggcacaccagcgccctggccttccgcctgaataatgcctggcagagctgcccccataacaacgtgaccggcattgcctttgaggacgttccgattacttccagagtgttcttcggagagcctgggccctggttcaaccagctggacatggatggggataagacatctgtgttccatgacgtcgacggctccgtgtccgagtaccctggctcctacctcacgaagaatgacaaatggcattcgttggcttcaaaggcagcttccggcccatctgggtgacactggacactgaggatcacaaagccaaaatcttccaagttgtgcccatccctgtggtgaagaagaagaagttgtgaggacagctgccgcccggtgccacctcgtggtagactatgacggtgactcttggcagcagaccagtgggggatggctgggtcccccagcccctgccagcagctgcctgggaaggccgtgtttcagccctgatgggccaagggaaggctatcagagaccctggtgctgccacctgcccctactcaagtgtctacctggagcccctggggcggtgctggccaatgctggaaacattcactttcctgcaaaaaaaaaaaaaaaaaaaaaaaaaaaaaaa

SEQ ID NO: 57704 - DNA, 2180 bp, Homo Sapiens
ggcacgaggctgtcccactgggcaggtgcctctgacggagaggaggcgtcgtcgggaagtatgtggccgtggctgctctggcatgatcctgaagactggcacgaaggggaatggagccgcacagagaatttcaggcatcagaggggaagcgcaggtttgtctacagattttgagcgttcgaagttgacccctgactaagtatactttgctgctccctcagcctttgaaaaaatgtctgtcacatatgatgattccgttggagtagaagtgtccagcgacagcttctgggaggtcgggaactacaagcggactgtgaagcggatcgacgatggccaccgcctgtgcagcgacctcatgaactgcctgcatgagcgggcgcgcatcgagaaggcgtatgcgcagcagctcactgagtgggcccggcgctggaggcagctcgtggagaaagggccccagtacgggaccgtggagaaggcctggatggccttcatgtccgaggcagagagggtgagcgagctgcacctcgaggtgaaggcctcactgatgaacgatgacttcgagaagatcaagaactggcagaaggaagcctttcacaagcagatgatgggcggcttcaaggagaccaaggaagctgaggacggctttcggaaggcacagaagccctgggccaagaagctgaaagaggtagaagcagcaaagaaagcccaccatgcagcgtgcaaagaggagaagctggctatctcacgagaagccaacagcaaggcagacccatccctcaaccctgaacagctcaagaaattgcaagacaaaatagaaaagtgcaagcaagatgttcttaagaccaaagagaagtatgagaagtccctgaaggaactcgaccagggcacaccccagtacatggagaacatggagcaggtgtttgagcagtgccagcagttcgaggagaaacgccttcgcttcttccgggaggttctgctggaggttcagaagcacctagacctgtccaatgtggctggctacaaagccatttaccatgacctggagcagagcatcagagcagctgatgcagtggaggacctgaggtggttccgagccaatcacgggccgggcatggccatgaactggccgcagtttgaggagtggtccgcagacctgaatcgaaccctcagccggagagagaagaagaaggccactgacggcgtcaccctgacgggcatcaaccagacaggcgaccagtctctgccgagtaagcccagcagcacccttaatgtcccgagcaaccccgcccagtctgcgcagtcacagtccagctacaaccccttcgaggatgaggacgacacgggcagcaccgtcagtgagaaggacgacactaaggccaaaaatgtgagcagctacgagaagacccagagctatcccaccgactggtcagacgatgagtctaacaaccccttctcctccacggatgccaatggggactcgaatccattcgacgacgacgccacctcggggacggaagtgcgagtccgggccctgtatgactatgaggggcaggagcatgatgagctgagcttcaaggctggggatgagctgaccaagatggaggacgaggatgagcagggctggtgcaagggacgcttggacaacgggcaagttggcctatacccggcaaattatgtggaggcgatccagtgatgagtcggggacaggccagcggggggacggaggcggcgggcccaggagcctcagccagccacgtgggcatccactccttttcctgcaagagatgatggttccattgctcttggcttcatggtgttcctggaaggcagatgagctggtcatttcgcctgggactcggcacctttccgagtgcagctggagggatctgagcgcaggaagacgcagaacaacagaaatagccgcccctccccgcccactgtgcctgttggcctatcatagatctctatgttcttgactttgtctctcctttccgagtcaatggtgggttacactgatcttgttccactgattactctctctgacgagtccatcacctgcaacttaaatgaacaagcttacatcccattttgagtgaagattttgaggtttttaatttaaaaaaaaaaaaaaaaaaaaaaaaaaaaaaaaaaaaaaaaaaaaaaaaaaaaaaaaaaaaaaaa

SEQ ID NO: 57705 - DNA, 2251 bp, Homo Sapiens
aggtgtagtaccagcctctcagtttggcagcgttcctcttggctcgcacggtgtttcttcaggaggtgaggatggagctggagcagaaaccaccccagtggcagagcctactaagctggtgctcccgatgaaagtcaacccatattctgtcatcgacatcacgccattccaggaggaccagccgcccacccccgtgcccagcgctgaggaggagaatgtgggtctccatgtgccctgcgggtacttggtgcctgtaccctgcggctatgcggtgccctccaacctgcccctcctgctgcccgcctactccagcccggtcatcatctgcgccacgtccctggacgaagaagcagaaacaccagaagtcacagaagatcgccagcccaattctctgagttccgaggagcctccaaccagtgaagatcaagtcggtcgagaggacagcgcacttgcccgctgggccgcagacccggccaacacagcctggatggagaatccagaagaagcaatttacgatgacgttccaagggaaaactcagactctgaaccagatgaaatgatttatgatgatgttgagaatggggatgaaggtggaaacagctccttggaatacggatggagttcgagtgaatttgaaagttacgaagagcagagtgactcggagtgcaagaatgggattcccaggtccttcctgcgcagcaaccacaaaaagcaaatgcagaagctcgtgaaggccgcgaaggacggcaccaaggacgggctggagaggaccagggcagccgtgaagaggggccgctccttcatcaggaccaagtctctcatcgcacaggatcacagatcttctcttgaggaagaacagaatttgttcattgatgttgactgcaagcacccggaagccatcttgaccccgatgcccgagggtttatctcagcagcaggttgtaagaagatatatactgggttcagttgtcgacagtgaaaagaactacgtagatgctcttaagaggattttggagcaatatgagaagccgctgtctgagatggagccaaaggttctgagtgagaggaagctgaagacggtgttctaccgagtcaaagagatcctgcagtgccactcgctatttcagatcgcgctggccagccgcgtttccgagtgggactccgtggaaatgataggcgttgtcttcgtggcttcgttttctaagtccatggtgctggatgcatacagtgaatatgtgaacaatttcagcacagccgtggcagtcctcaagaaaacatgtgccacaaagcccgcttttcttgaatttttaaagcaggaacaggaggccagccccgatcgaaccacgctctacagcctgatgatgaagcccatccagaggttcccacagttcatcctcctgctccaggacatgctgaagaacacctccaaaggccaccccgacaggctgcctcttcagatggccctgacagagctcgaaacactagcagagaagttaaatgaaagaaagagagatgctgatcaacgctgtgaagtgaagcaaatagccaaagccataaacgaaagatacctgaacaaggttgagagaggttttcttcaactctattccaaaattatttttgctttgtgctaataagctgtcgttgtccagcaatactaatcttttggatcgtttggagtaattcccttcgcccagagttcttaaccggggtggatggaggccttcgggagagtcacaccaatgtggaaattgtatgtaaaaccttaacagcctgtcttaacagcattttcttaggaaagagattcatacattcattagaccctcaaatggatccaggacctcccaaggggttaagagcaactcctttagcttacttttcctttcaaaataacggtatttaatttcagatagtaatagttaaagctgaaaatatttacaggctaggcacagtggctcacacctgtaagcccagcactttgggaggctgaggtgggaagatcgctggaacccaggagttcaagaccagcctgggcatgatagtgagaacccatatctaaaaaaagaaaaaaaaaatagctgggcacagtggcatgcacctatatagtctgagctacgtgggaggctgaggccagaggattgctcgagcctgggaggtccaggctgtggtgagctgttattgaggtgctgcactctagcctgggtgatggagcaaaaccctgtttcaaaaaaaaaaaaaaaaaaaaaaaaaaaaaa

SEQ ID NO: 57706 - DNA, 2153 bp, Homo Sapiens
ggctcctttccttatatgtctaaccctggcctggagcactggaggatgaggtccgctgactgcagcgtccatcctggtcctccccaggcactgtggcctccctcacagcatggctgccttgggtactcggacttcacgtggaaggccagggctccgagagcaaatgccccagcaagacagaagctcagccgcctttgatgacctagaagctaggcagcatccattgtactgccttctatgggttgtgagtgagtcccaaacctgccttgactcaaggaaacggaattaggctctacgtcttgactaggtagtggcgaagttctggaagcacatgagtaggagatactgtgacggtttcatctttggaaaataccatctagcacacctgaatctgctttcagggggtgtaaggggatttccatggcaaaatttgaagccacatgtggtcactgctttgtactgaggaaacaaagtgctctgggcatccagaaagggggtacgttttttcttactgggataaatctggctgcattttagctaatcctggaaaattgatcgacaaaagcaaaggaccaagaaagctgcttatatcagtgtctcctccaccctcagcctccagtagcatccctacgttttacaattttatttatgtcactttaaataaggacattgagagggaaaaggcctcatcgacataccaactacaggccaggtggaccttcggtgcacacacaccccagcgcccacagagatccaggcctcctgtgtatgaatgtgtgccatgaatttagacctatttctcgccttccgggctctctattcctcatcctccatccaagtggccatcttgtgcaggccctgaaagcagcagatctcacctgcattggaggatgagacgccacatgaagaagaaagaagacgccacagacagcagcgcagtaccaccttccagagatgtgagtgtgaccgtctttgaccttctagcccagctgctttccctgaatgcaatgcatgagcaggccaggcaaaactagagagggaagctgcccagctaacccacagaattatgagagataaaaaatcattgtcttaagccactaagtctgttatgcagcaatatatagcattcattcaacttttgtctcatgaatactctcatttcttttataagttcttttgtggttcaaattagctcaaatcagtttctgatgcttatgaccaaatgcccctatgtgatagattttgaggggttaagaagcttgctcggatcacacagcggtaagtagcagcacttcatctttaacccacctctggcccactccctttccataggtccttgttgcctccctccctaatcccttccagtctagtttcctcactcattttagcatcttgaagatgcctgaccttttgtaacaggcacttagaagaggcaataatcaagctgtgagctggaatactgggtttctcatccaataaccaggttggcaggttggtaaccatacaagggacttttcaaactggagaattagtgtgctgagcacaaagtggtgagtattttgagagttactgaaatataattgacataacaataaaaatacaatatttaagtgcatgtatttcaagtgtacgatttgacaagtttggttatattatatacacctacgaaaccatcaccacaattaagaaaatgagcatagctatcacacacaaaagtttccttgtgccccttggtaattcctccctctctcctgcccacatctctccttttcccaggcaatccctgatctgatttctgccgctatcaattcgtttgcatttcctagaattttaaataactgaaaacatacattaagaactctttttctctggccgagtgtggtggctcacgcctgtaatcccagcactttgggtggccaaggcgggcagatcgcctgaggtcgggagtttgagaccaccctggccaacgtggtgaagccctgtctctgctaaacatacaaaaattagccaggcatggtggtgggcatctgtagtcccagctgctcgcgaggctgaggcaggagaattgcttgaacctgggagacagaggttgcagtgggctgagatcgcgccactgcactccagcatggacaacagagcgagactccgtcccc

SEQ ID NO: 57707 - DNA, 1962 bp, Homo Sapiens
ccacgcgtccggcgcgcgcagggcctgagcgggcgccggagggaaggggaagcggcggggtagtaacagattatgggcaacagtccttttaattaatctaccgtcatcatggctaatgaggactgtcccaaggctgctgatagtcctttttcatcagataaacatgcccaactcatcttggcccaaatcaataagatgagaaatggacagcatttctgtgatgtgcagctgcaagttggacaggaaagttttaaagctcatcggctggttttggctgccagcagtccttactttgcagctttgttcactggaggaatgaaagagtcctcaaaagatgttgtaccgattctaggaattgaagcaggaatctttcagatacttctagatttcatttacacaggtatagtgaacataggtgtgaataatgtccaggagttgattattgcagcagacatgctacagttgactgaagttgttcatctttgctgtgaatttctgaaaggacaaattgatccactgaactgcattggaatttttcagttctctgagcaaattgcctgccatgatctcttggaattctcagaaaactacattcatgtccatttcttggaggttcatagtggagaagagttcctggcacttacgaaagatcagctgatcaaaattttgcgaagtgaagagcttagcattgaggatgaataccaggtcttcttagctgcaatgcaatggattctgaaagatttgggaaaaagaagaaaacatgtggtggaagtgctagacccaattcgattccctttattacctcctcagagacttttaaagtatatagaaggagtatccgattttaatcttcgtgttgcattgcaaacacttctgaaagagtactgtgaagtatgcagatctcccaaagagaacaagttttgtagttttctgcagacatctaaggttcgacctcggaagaaagcaagaaagtacctgtatgcagtaggtggatatactcggttgcaggggggtcgctggagtgatagcagagccctcagctgtgtagaacgttttgacacctttagccagtactggaccactgtgtcttcacttcatcaggctcgaagtgggctgggagtaacagttctgggagggatggtctacgctattggaggtgaaaaggattcaatgatttttgattgtactgaatgctatgatccagttactaaacagtggacaactgtagcttcgatgaatcatccccgctgcggcttaggagtgtgtgtgtgttatggggctatctatgctttgggtggatgggttggagctgagatagggaacaccattgaacgatttgatcctgatgaaaataaatgggaagtagttggtaacatggctgtgtcacgctactactttgggtgctgtgaaatgcaaggtttaatttatgtaattgggggcatcagcaatgaaggaatagaacttcgttcttttgaagtctatgatccactttctaagcgttggtctccacttcctccaatgggaaccaggagagcatatcttggtgtggctgcactcaatgactgcatctattctgttggaggatggaatgagacccaagatgctcttcatactgtagaaaaatattcctttgaagaggaaaagtgggttgaagttgcctcaatgaaagtgcctagagcaggcatgtgtgttgtggcagtcaatggtcttctgtatgtttctggaggtcgatcttccagccatgattttttggctccagatactcacagatacgaggttttccgcttgaagtgggagaatatgtgcattcttttcaatgatcacaagactctaacaaaggggatttttaatctttaattttcaagatggttaaaatattgaaatgtttaagtggataactatattattcataaaatgactgagtgaaaactaatatactatgagatgaaaaaaaaaaaaaaa

SEQ ID NO: 57708 - DNA, 1225 bp, Homo Sapiens
tccttactgctttgtcttgaagacagaacgatgccaaagaaagcaaagcctacagggagtgggaaggaagaggggccggctccctgtaagcagatgaagttagaagcagctggggggccttcagctttaaactttgacagtcccagtagtctctttgaaagtttaatctcgcccatcaagacagagacttttttcaaggaattctgggagcagaagccccttctcattcagagagatgaccctgcactggccacatactatgggtccctgttcaagctaacagatctggagagtctgtgcagccgggggatgtactatggaagagatgtgaatgtctgccggtgtgtcagtgggaagaagaaggttttaaataaagatggcaaagcacactttcttcagctgagaaaagattttgatcagaaaagggcaacgattcagtttcaccaacctcagagatttaaggatgagctttggaggatccaggagaagctggaatgttactttggctccttggttggctcgaatgtgtacataactcccgcaggatctcagggcctgccgccccattatgatgatgtcgaggttttcatcctgcagctggagggagagaaacactggcgcctctaccaccccactgtgcccctggcacgagagtacagcgtggaggccgaggaaaggatcggcaggccggcgcatgagtttatgctgaagccgggtgatttgttgtactttcccagaggaaccattcatcaagcggacactcctgcggggctggcccactcgactcacgtgaccatcagcacctaccagaacaatgatgctggagctaggatgagaagatgtgacttgagggccattgctccccagaaatgatcctgtgttttgagcctaatgctccttcaggtaccatgtaaagttcatggggagatttccttttggataccatctcggggcttgtatttgatactgcaaaggaagacgtggagttacggaccggcataccccggcagctgctcctgcaggtggaatccacaactgttgctacaagacgattaagtggcttcctgaggacacttgcagaccggctggagggcaccaaagaactgctttcctcagacatgaagaaggattttattatgcacagactccccccttactctgcgggagatggggcagagctgtcaacaccaggtggaaagttaccgaggctggacagtgtagtgag

SEQ ID NO: 57709 - DNA, 1452 bp, Homo Sapiens
atgcccagaaaatatggtaagctatgttaacaagccatattagatatcaagcattaatatggaaataaaccagcccacctgcacccaggtgaaataaacagctttattgctcacacaaagcctgtttggtggtctcttcacatggacgcgcatgaaatttggtgccgtgactcggatcgggggacctcccttgggagatcaatcccctgtcctcctgctctttgctccgtgagaaacatccacctatggcctcaggtcctcagaccgaccagcccaagaaacatctcaccaatttcaaatccggcattgggctctcaccattggccaagattccctgccccggtgaggccggaagcagttcagacacctgacttctggcaacatgtgagcctgacccaagcagatcactggtgaccagtaaatattgaagctccaagagtattttccaaaagaagagcaagggcccggctggaggctgacaggcttccaagaacctgaatcccctcttggactcctggcttgcttttggctacagaatcatcatctgcatctggagatttccactgggactttctggaggcagacaaatcctgccctgattctggggaccatgcctgtggagatgcacagttctaccattcaaaatgactatctgaaaatacctcctaagaaggacaaaacttttcttcagccaagagggcacttgttaatatgattagatacatatgtaatggtgtccccctcccctcttagcccctcagtgtgtgttctctcagtcagtgtatctacatgcaggagacattaaaggatggatgtaacttcagaccttcatttccccataagtattgctttcagagaatatctaatgaagtcacatggatgaagatttctgtatcatttgtttcccagaatggctccccaacttacatttcatcatccacccacatatccacttatccattcaaccttcatgtactgactgaaaactcctcttatatagttttcctcagcagtttcctcttctggggattttctgctgttttggtaacctgttttaatgttgtattttatgtgttcctaagggcaatgcaagttgtttaaagaggcaattatctcatgtgatttatgagatttgctggacaaattccaataaaaaatgtactcgagaagtatgtcacaggtttattgctggtatcaataaagtctctatagtgtgtggcaatccatgttttaaaaggagttagctttgtgatcatagattatcaaatctaatatgccaccaattataagatttattccagtttttgagatgtaaaaatgtaaaaaataaaggtcagcaattattttataatttcatgtattgtaagatatatgtagaatcaaaagacggtaaaatgtgaaataaagtgcacctaagaattgataaaaaaaaaaaaaaaaaaaaaaaaaaaa

SEQ ID NO: 57710 - DNA, 2347 bp, Homo Sapiens
ggcacgaggccctgcagcggcccgagctgtgcccggctgcttccgcggcggcgctgcccgcacatgggctaggctgccaggatgttcagcttcgaaggcgacttcaagacgcggcccaaggtgtcccttggcggcgcgagcaggaaggaggaaaaggcttctcttttacatcgtactcaggaagaaagaagaaagagagaggaagaaaggcgaaggttgaaaaatgcaataattatccagtcatttattcgaggctatagagacagaaaacagcaatattccatccaaagaagtgcatttgatcgctgtgctaccttgtcacagtccgggggcgcttttcccattgctaatggccccaaccttacccttttggtaaggcagcttctgtttttttacaaacaaaatgaagactcaaaacgtttgatatggctgtatcagaacttaattaaacacagctctctgtttgtcaagcagttggatggatctgagagacttacatgcttatttcagataaaaagattgatgagcctctgttgcaggttgctgcaaaactgtaatgatgacagtttgaatgttgcacttccaatgagaatgcttgaagtattttcgtctgagaatacttacttgcctgttttacaagatgctagctatgtggtgtcagtgattgaacaaattttgcactacatgattcacaatgggtattataggtctctatatttgttgattaacagcaagcttccatcaagtattgaatattctgatttatctcgagttcctatagcaaaaattttgctagagaatgttctaaaaccattgcactttacttacaactcctgtccggaaggtgcgaggcaacaagtttttacagccttcacagaggagtttctggcagcaccttttacagatcagatttttcatttcatcattccggcgcttgcagatgcgcagaccgttttcccttacgagccctttctgaatgcactgttgttaatagagagtagatgttcaagaaagagtggtggagcaccctggcttttctatttcgttttaactgttggcgaaaattatttgggggccctctctgaggaagggctgctggtgtatttgcgggtgctgcagaccttcctctctcagttaccagtctctcctgccagcgcgagctgtcacgactcagccagtgactctgaggaggagagtgaagaagccgacaagccctcaagcccggaggatggcagactgtcagtatcatacataacagaggaatgcctgaagaagctggacacaaagcagcagaccaacaccctgctcaacctggtgtggagggactctgcgagcgaggaggtcttcaccaccatggcctccgtctgccacacgctgatggtgcagcaccgcatgatggtacccaaagtcaggcttctctacagtttagcctttaatgccaggtttctgagacatctttggtttctaatatcttccatgtcaacacggatgatcacagggtctatggtaccgttgcttcaggtgatatccaggggttctcctatgtcttttgaagattctagtcgaatcatcccactcttttacctttttagctccttgtttagtcattcactaatttccatacatgataacgaattcttcggtgatcccatagaagttgtaggtcaaagacaatcatcaatgatgccttttactttagaagagctgataatgttgtctcgatgccttcgagatgcatgcctggggatcatcaagttggcttatccagaaaccaagccagaagttcgagaagaatatattacagcatttcagagtattggagttactactagctctgaaatgcaacaatgcatacagatggaacagaaaagatggattcagttatttaaggttatcaccaatctagtgaaaatgttgaagtccagagacacgaggagaaatttttgtcctccaaaccactggctgtcagaacaagaagatattaaagcagataaggtgttattgaaagatctttttaatatttatcattaaaaaatacattcagcttgtgtctttctggagagaagaattaagcactttaaaattatttattttatgactcatatgactaaatagtaatgataaaccttattactaactcttacgccaacttcttaatggaacatatagcagtatcattgacttaaaatgatattctgagttattaatcctcaattttcctttttaacctgagattatattaaagccttaatgattaaaaaaaaaaaaaaaaaaaaaaaaaaaaaaaaaaaaaaaaaaaaaaaaaaaaaaaaaaaaaaaaaaaaaaaaaaaaaaaaaaaaaaaaaaa

SEQ ID NO: 57711 - DNA, 2059 bp, Homo Sapiens
ctgtgacagcaggtttgcaaaaccaatgaaaaaaacagttttccccaggcagggaggaattttttttataattaaatactgaaagttggaattcctatgatcatcaaagtcactctcaggaattagaagcaagtttacatgtcatctttattttttgctttagtcctctttgatacgcaacctacggctctctgagtccttgaaaaagaaccaactctggaacgggattataagtataactttgttggaagggaagaatgtctcaggaggaagcatgacagagatgtttgtccagttaaaactgggagatcagaggtataaaagtaaggatgggcattttggacattgaagtgtggggaaaggacaacaaaaagcatgaggaacgtctgggcacgtgtaaagtggatatctcggcactccctctgaagcaagccaactgcctggagctgccactggacagctgtctgggggctctccttatgttggtcacacttacaccctgtgcgggggtctccgtctctgatctgtgtgtctgccccttagcagacctcagcgaaagaaagcagattacccagcgatattgcttacagaactccctgaaagatgtgaaagacgtcggcattctacaagtgaaggttttaaaggcagcagatctcttagcggcagatttctcagggaagagtgacccattttgcttgttggagttaggcaatgaccgacttcagacgcataccgtctacaaaaacctcaaccctgaatggaacaaagtttttacatttcccattaaagatatccatgatgttttggaagtgacagtgtttgatgaagatggagataaacccccagattttcttggaaaagttgccattcccttgctgtccattagagatggacaaccgaattgttatgtactaaagaataaagatttagaacaagcttttaaaggagttatttacttagagatggaccttatatataatccggtgaaagcaagtattaggacttttactccccgggaaaagcgctttgttgaagacagccgcaagctgtccaaaaagatcttatcaagagatgtggaccgtgtgaaaagaatcactatggcaatatggaatacaatgcagttccttaaaagctgcttccagtgggaatccacattaagaagtacaatagcattcgcgcaccgcaaagaggaaccacccctgtctatgaaatgtacccttttctctggtgacattggcccatccttatgagcataataaaatcgcagaatcaaagcgctgcaagagatcttaaaaccacctaagtctaccactgagagcccaagaatcttggaaggacttcacagctggcctcatgccttcactttatatctcagggcattttctctcatttgtaaagggacttgtccttgatcaaattggtaatgtcagccatgggaggagaaatcaagtctcccgactgcaaatctttgtatatttggtatcatgccattcatttctgtcctgtgcaaagatcactataaaaactaatacgaggtatgagtggtctaagagtgtgaatatcagtcatgatcattggtgaatctgatttctgaatgttatgtggttctgcttctgttttctactgccaatatatgctgaatgttctctcttagccaacaggcatagcctcatataaaaaatgggggaaaaaaaacatttattagcccaagaagccaatgggttcaaggtcactcccaacatttttatgccatcaagtatatcagctccaaaagaggcttttcctttgccattggggggtattttgtttgctgtcgtttattttagttctccactgcttcggtgtagaggacctatgctgcctgtaggcttgacctttcctatactttttctgctgtctgaagttgctaaaacatttggccttaataaaaacactaataaaggttttattaatctgtaaaaaaaaaaaaaaaaaaaaaaaaaaaaaaaaaaaaaaaaaaaaaaaaaaaaaaaaaaaaaaaaaaaaaaaaaaaaaaaaaaaaaaaaaaaaaaaaaaaaaa

SEQ ID NO: 57712 - DNA, 1772 bp, Homo Sapiens
catgtagagcgcatgaagtacaggacaataaagcttcctacacatatcaccaggaggatctctttgaaagattcactgcaggactaccagagagaataatttgtctgaagcatcatgtgttgaaacaacagaagtctattcacctgtgcactaactagaaacagagttacaatgttttcaattctttgagctccaggactccaggggaagtgagttgaaaatctgaaaatgcggccatggactggttcctggcgttggattatgctcattctttttgcctgggggaccttgctgttttatataggtggtcacttggtacgagataatgaccatcctgatcactctagccgagaactgtccaagattctggcaaagcttgaacgcttaaaacagcagaatgaagacttgaggcgaatggccgaatctctccggataccagaaggccctattgatcaggggccagctataggaagagtacgcgttttagaagagcagcttgttaaggccaaagaacagattgaaaattacaagaaacagaccagaaatggtctggggaaggatcatgaaatcctgaggaggaggattgaaaatggagctaaagagctctggtttttcctacagagtgaattgaagaaattaaagaacttagaaggaaatgaactccaaagacatgcagatgaatttcttttggatttaggacatcatgaaaggtctataatgacggatctatactacctcagtcagacagatggagcaggtgattggcgggaaaaagaggccaaagatctgacagaactggttcagcggagaataacatatcttcagaatcccaaggactgcagcaaagccaaaaagctggtgtgtaatatcaacaaaggctgtggctatggctgtcagctccatcatgtggtctactgcttcatgattgcatatggcacccagcgaacactcatcttggaatctcagaattggcgctatgctactggtggatgggagactgtatttaggcctgtaagtgagacatgcacagacagatctggcatctccactggacactggtcaggtaccccaattatgaatttattagtgataactctatttcctggtcagctggactgcacaatcgatacacagaaaattcacttcgtggagtgataactctatttcctggtcagctggactgcacaatcgatacacagaaaattcacttcgtggagtgatcctggatatacattttctctctcaggcagacttcctagtgtgtactttttcatcccaggtctgtcgagttgcttatgaaattatgcaaacactacatcctgatgcctctgcaaacttccattctttagatgacatctactattttgggggccagaatgcccacaatcaaattgccatttatgctcaccaaccccgaactgcagatgaaattcccatggaacctggagatatcattggtgtggctggaaatcattgggatggctattctaaaggtgtcaacaggaaattgggaaggacgggcctatatccctcctacaaagttcgagagaagatagaaacggtcaagtaccccacatatcctgaggctgagaaataaagctcagatggaagagataaacgaccaaactcagttcgaccaaactcagttcaaaccatttcagccaaactgtagatgaagagggctctgatctaacaaaataaggttatatgagtagatactctcagcaccaagagcagctgggaactgacataggcttcaattggtggaattc

SEQ ID NO: 57713 - DNA, 1183 bp, Homo Sapiens
atccctttttattgctgagcagtattctatggtatgaatgtatgatggttcggacatatgggttgtttcctattttaggctgttatgaatgaagctgctctgaacattcatgtatagatttttgtgtatacaggtattttttagaaaatagagataagccaggcgtggtgatgtgtacctgtagtcccagctactctggaggctgaggcaggagaatctcttgagcccagaggttcaagatgagcctgggcaacattttggagatcctgtctccaaaaaaaaaagatggaggtagttttttgtaatggcaagattgtacattagaagatagaaaagtaggttttgcatcttactagggaagatacatgtatatttctctccctttggactgatcatttaagttgtctcaatttccttatcaagaaactggcataatatatgttctgcctacatcccagggtggttgtatagataaactgagataatatatggcctcctcccaagtagctgggattacaggtgcgtgccaccacgctgggccgatttttgtgttttcggtagagacggggtttcactgtgttggccaggctggtcttgaactcctgacctcaagtgatcctcccaccttggcctcccaaggtgctgggattgcaggcgtgagccaccgtgcccggcctcagagtagttcttaaatggtaatctagagacaactcttttaggccatcttgctttttctaataattgatgtgtagatgttccttttatattctgtttactcattgttgacgattataggttgcaatacctgctcccggatttagtttatcaccttacttttaattgaattatttgatatataagaaattccaagtccaagcatggtggctagcgcctgcaatcccagcactttgggaggccatggtgggaggatcgcttgggtccaggagtttgagaccagctgaagcaacatattgggactctgtctctaccaaaaatacaaataagttggctgggcatggtgatgcactcctataatcccagctactcaggaggctgaggtgggaggatcacttgagctctagaggccaaggctgcagtgagccgtgatcatgcctctgcaccctagtctgggtgacagaaggagaccctgtctcaaaaaaaaaaaaaaaaaaaaaaaaaaaaa

SEQ ID NO: 57714 - DNA, 711 bp, Homo Sapiens
aggagatgcggctgctgctggccctgttgggggtcctgctgagtgtgcctgggcctccagtcttgtccctggaggcctctgaggaagtggagcttgagccctgcctggctcccagcctggagcagcaagagcaggagctgacagtagcccttgggcagcctgtgcgtctgtgctgtgggcgggctgagcgtggtggccactggtacaaggagggcagtcgcctggcacctgctggccgtgtacggggctggaggggccgcctagagattgccagcttcctacctgaggatgctggccgctacctctgcctggcacgaggctccatgatcgtcctgcagaatctcaccttgattacaggtgactccttgacctccagcaacgatgatgaggaccccaagtcccatagggacctctcgaataggcacagttacccccagcaaggtcagtaggtctccaaggacttgtgtcccgctgctgctcatctgatcactgagaagaggaggcctgtgtgggaacacacggtcattctaggggccttcccctgccctccagcaccctactggacacacccccagcgcatggagaagaaactgcatgcagtacctgcggggaacaccgtcaagttccgctgtccagctgcaggcaaccccacgcccaccatccgctggcttaaggatggacaggcctttcatggggagaaccgcattggag

SEQ ID NO: 57715 - DNA, 2923 bp, Homo Sapiens
ccagcctggacgacagagcagactccatctcaaaaaaaaaaaaaaaatggtcaccccttttgctcctaaatcaccctcaaagtaaaagagaacaagaaacagaagcagaaatccatatttagtgaaataagacaacacctgtagctccaaacctgtagaagcagatcccagagaaaagcaggccagttctctcctggaatcccagaaagtcccaggaattggaggcttcagtgctgcagtagggaggggactaaaaacaaagtctgtatatggagcagtaagacctccgggttctcatcccccatcctgtgtgctctcgggtgactagccctctccctctccaggtttagcttctggagaaattaaatcaaagaggctctagaactggggatggcaggcattgagtgcagggagtgagttgccagaggctgagagcagagagatttagtggcagtgggcagagcaaacagcaaaatgactgccctcttccctggccttgctccagaaactgagcagccagacatacacactcccagaaggcagttggaggtccccccgggcaatcagaaccacccacagagaagacctccagatactgacatttagaagcctctgaccaaagagctgcctggccacccactggcttactcgctgacaggccatgctcctgccgtacacaccgatcctatcagtcatcctcatgggctcctttccagacttctgaggaaagcttccaacatgaagagggagttcaaaacaaacagagagagagagagagagagagagagagagagagagagagagagaaaagaaatataaacaatgcagggagcaaaagataacttcaaataaactcaaaatattcttctgggagagatgagacaatattgcatacataaaacaagaagaggatgctatcactaaattttaaaaaaaagtaacagaaagtaagaaagacctctaagaaatgtttctgaaatgaggtataatttttttttttttgagggggagtcttgctctgtcacccaggctggagcgcagtggcgtgatctcggctcactgcaacctccgtctcccgggttcaagtgattctcctgcctcagcttcctgagtagctgggattacaggcatgcgccaccatgcctggctaattttgcatttttagtagagacggggtttcaccatgttggccaggctggtctgaaactcccgacctcaggtgatctgcccacctcagcctcccaaagtgctgggattacaggcatgagctaccgtgcctggcctgtgtatttttggagacagagtcttgctctgttgcccaggctggagggcagtggtgcaaactctgcctcccgggttcaagcgattctcgtgcgtcacctcccaagtagctggggctagaggcatgtgccaccatgtctggttactttttatataaaccttcagtttaatcttttagcttactgctgtgtttttcagctttattcactttgctttttttctatattttcgtttcaactcaacttttaaaaaatcatacttgtatatttgtatatttatatttattttccaagacctcatttgcctctttttcataatgggctattattgctccatggtacagaatcttctgttctttcctaaactattagttatttttaaaatatttgttaactttctcccccttgctagttctcaggtacccgctttctcccagagtgctggctttccttaattatttgctgacttgtgctggtgtgtaacccttcatacttaggtatttctatttgtctgactgctgatttgattccaatccagtgtttcttctgattcgtggagaagagacgacaacgctgtgaggctctggttttggtggcttgtctgggtgtgggagctccttgtcatcatgggatttttagctccctgggtcgccatcctacatggccactctcctgccgatgctgcccgctactcagcaggaggggaagtcgagaccacctccttaaccttacagacattgattgtgagcttggagcaccttccgtgactggaccacccatgcagtggtcctttgctttttgcatttttaactgcaattttccccaagagtcttccctaatacagtctcttaggaattgacggtgggattaaacaaggcatgtttctgcactgaatatggtctatgggttgccactttgcaacctcagctttaaggcttatttcctcccaggaaactgatgttaactttttaagttaaaaatgtgtatataagtaatacatgtttattttggaaattagaaaatacaggccaggtgtggtggctcatgcctgtaatcccagcattttgggaggttgaggcgggaggattgcctgggcccgggagtttgagaccagcctgggcaacatagggaaattccatctctacaaaaaaattaaacattggctgggtgtggtggtgcccacctgtggtcacagctactcgggagactgaggtgggaggatagcttgggcaggggaggttgaggctacagtgagccacgatcacaccaatgtgacacagtgagaccctgtctcaaaaaaaaaaaaaaagaaagaaaatataggtaaacacaaagacaaaaaagcagggcatggtggctcacacctgtaattctagcaccttgggaggctgaggcaggaggatcacttgaggtcaggaactcgagacgagaccaggctgggcagcatggcaggaccccatctctataaaaagtacaaaaattagcagggcacggtggtgtgcacctgtggtcctgctacttgggaagttgaggtgggaggatcacctgagccctggaggttgagggtgctgtgagccatgatggcaccactccactccagtccaggtgaaagagccagatcctgtctcaaaaaaaaaaaaaaa

SEQ ID NO: 57716 - DNA, 2773 bp, Homo Sapiens
ccacgcgtccggctacccccattgtggtctctgccctccccgcgggcccagggcatgctccgtgcccctgcgcccggtctcggcggcggcaggcgacactccgcgccggcggagacatgaggcgctgccggtgggccgccctggccctggggctgctgcgcctctgcttggctcaggccaacttcgccccgcacttcttcgacaacggggtcggcagcaccaacggaaacatggctctgttcagcctcccagaggacacccctgtaggctctcacgtatacaccctgaatgggacagaccctgagggagaccccatctcctaccacatcagctttgaccccagcactagaagcgtcttttctgttgaccccacttttggaaacatcaccctggttgaagagctggacagagagagggaagatgagattgaagccatcatcagcatttctgatggcctgaatctggtggccgaaaaagtcgtgatcctggtgaccgatgccaatgatgaggcgcccaggttcatccaggagccttatgttgccctggttcccgaggacatacctgctgggagcatcatctttaaggtccatgcagtggacagggacacaggctctggagggagtgtcacctacttcctgcagaacctgcactccccatttgccgtggaccgccacagcggtgtgctgcgcctccaggctggggccactctggactacgagaggtcccggacccactacatcaccgtggtcgccaaggatggcggtgggaggcttcatggggctgatgtggtgttctcagccaccaccacggtcacggtcaatgtggaggatgttcaggacatggcccctgtcttcgtgggcacaccctactatggctatgtgtacgaggacacccttccgggctcggaggtactgaaggtggtcgccatggatggagaccggggcaaacccaatcgaattctctacagccttgtaaatgggaacgatggagcctttgaaattaatgagacatctggagccatctccatcactcagagcccggcccagctccagagagaggtgtatgagctgcatgtacaggtgactgaaatgagccctgcggggagcccagctgcccaggccaccgtcccagtcaccatcaggattgtggacctcaacaaccacccgccaacattctatggagagagcggaccccaaaacaggtttgagctgtccatgaatgagcacccaccccagggagagatcctgcggggcctcaagatcaccgtcaatgactccgaccagggagccaatgccaaattcaacttgcagctggtgggacccaggggcatcttccgagtggttccacagacagtcctgaatgaagcccaagtcacaatcattgtggagaactcagctgccattgactttgaaaagtccaaagtattaaccttcaagctcctggctgttgaagtgaacaccccagagaagttcagttccacagcggatgttgtgatccagctcctggacaccaatgacaatgtccccaagttcgactccctctactacgttgccaggattcctgagaacgccccagggggctccagcgtggtggctgtcacagctgtggatccagatacaggaccctggggcgaagtgaaatattccacctatgggactggggcagacctcttcctgatccacccatccactgggcttatctacacccagccctgggctagcctggacgctgaggccactgccaggtacaacttctatgtgaaggcagaggacatggaaggcaagtacagcgtagctgaggtgtttatcacactgctggatgtcaatgaccacccccctcagtttggaaagagcgttcagaagaagacgatggtgctagggaccccagtgaaaattgaggccatagacgaggatgcagaggaacccaacaacctggtggactattccatcacccatgcagagcccgccaacgtgttcgacatcaattcccacacgggggagatctggctcaagaattccatccgctccctggatgccctgcacaacatcacacctggaagggactgcctatggtccctagaggtgcaggccaaggaccggggctccccatccttcagcaccacagccttactcaagattgacatcacagatgctgaggtgagaagactaaggtacatgaaaaatagtaacttccctggtacaacaaagtcagtaagaaaaccaaaatttaagcccaagaaaccacattccagccagggtctgttcttgcatccccactgcgaaattgccttattcaatctgagtaatgtgaatctgtactctagagtttttcaaggggcagcccaagcatcttaaaaagtatcagattctcagaaatcctccctagaccattttccctctccctaaatttctatgtttacagaagcaactgaatacttccctacccaccaacatgctcctggctctcccctgcactgcttgctgctcttccacagcccttctctcatcctgacccctctgtctcatgtgcaccaccaagcttcttttgcttggcttgaaggtctgaacatccactctcaccttcatggtagcccaggctatttcatgatggtgacaccctcaagatccgtagaccactgtattagttcgttctcatgctgctaataaagatacccgagactgggtaatttatagaggaaaaaaaaaaaaaaaaaaaaaaaaaaaaaaaaaaaaaaaaaaaaaaaaaaaaaaaaaaaaaaaaaaaaaaaaaaaaa

SEQ ID NO: 57717 - DNA, 1648 bp, Homo Sapiens
gcggctcctgcgcgttcccgccgaggcagtggcggcgggagcggcagagacggcagcggccggagtcccgttgctgagtctcacatccgggttctggccgtgacccagctgcggccgccgcggagatgtgacccggcagtacggcaaatatggcggagccatctgttgaatcttcaagtccaggaggttcagcaacatcagatgaccatgaatttgatccatcagctgacatgctggttcatgattttgatgatgaacgaacattagaagaggaagaaatgatggaaggagaaacaaacttcagctctgaaatagaagatcttgcaagggaaggcgacatgccaattcatgaacttctcagcctttatggttatggtagtactgttcgactacctgaagaagatgaggaagaggaagaagaggaagaagaaggtgaagatgatgaagatgctgataatgatgacaacagtggctgtagtggggaaaataaagaggagaatataaaggattcatcaggtcaggaggatgaaactcagtcttccaatgatgatccatcacaatctgttgcttctcaagatgcccaggaaataatccgcccacgtcgatgtaaatattttgatacaaatagtgaagtagaagaagaatctgaagaagatgaagattatattccatcagaagactggaaaaaggagattatggtgggctccatgtttcaagcagaaattccagttggcatttgtagatacaaagaaaatgaaaaagtatatgaaaatgatgatcagctcctgtgggaccctgagtacttaccagaagataaagtgattatatttcttaaagatgcatctagaagaacaggtgatgagaagggtgtagaagcaattcctgaaggatctcacataaaagacaatgaacaggctttatatgaattggttaaatgcaattttgatacagaagaagcattgagaagattaagatttaatgtaaaagcagctagagaggaattatctgtttggacagaggaagagtgtagaaattttgaacaagggctgaaggcctatggaaaggattttcatttgattcaggctaataaagtccgaacaaggtcagttggtgaatgtgtagcattctattacatgtggaaaaaatctgaacgttatgatttctttgctcagcaaacacgatttggaaagaagaaatataatcttcatcctggtgtaacggattacatggatcgtcttctagacgaaagtgaaagtgctgcatctagtcgagcaccatcccctcccccaactgcatcaaacagtagtaacagccagtctgagaaagaagatggcactgtaagcactgctaatcaaaatggagtgtcatctaatggaccaggcatactccaaatgcttcttccagttcatttttcagccatcagttcaagagccaatgcctttttaaaataaagcttctgtggtcttgtttttaatggctcaactgtctgatgtaattgagtgaaggtttgcactgagaaattagcattcaggccttacccccatgaagtattactgttaacatatgttcggactgcttcccttcaccaatgtgaacaactttttttcccaaacagtattaaaagccactttgcaacacttgacttcat

SEQ ID NO: 57718 - DNA, 1530 bp, Homo Sapiens
ccacgcgtccggcggtagcaacagaggactcgacccggctggagctccggagagcgcgcgtgcgccgtcacgagctcggcgctgccggggccgcggtgtggaagcgagtattcgaccgccgtgcgggccgcggggatgttccgaaaggcccggcgggtgaacgtgcgcaagcggaacgactccgaagaggaagagcgggaacgcgatgaggagcaggagccgccgccgttgttgccgccgccgggcacgggcgaagaggcgggccccggtggcggcgacagggcccctggcggggagtcgctgctgggcccggggccgtcgccgccttccgcgctgaccccgggcctcggggctgaggccgggggcggcttccccggcggcgcggagcccggcaacgggctgaagccgcgcaagaggcctcgcgagaacaaagaggtgccccgggccagcctgctcagcttccaggacgaggaggaagaaaatgaagaagttttcaaagtgaagaaatcaagttatagcaaaaagatagtaaaattgctcaagaaggaatataaagaagatcttgaaaaatcgaagattaagacagaactcaactcatcagctgaaagtgaacaacctttggacaaaacaggacatgttaaggatacaaatcaagaagatggagttatcatcagtgaacatggtgaagatgaaatggatatggaaagtgaaaaagaggaagaaaagccaaagactggtggagctttttcaaatgctttatcttcattgaatgttcttcgtccaggagaaattccagatgcagcttttatacatgctgcaaggaaaaagcgccaaatggcccgagaattgggagatttcactcctcatgataatgagcctggtaaaggccgccttgttagagaagatgagaatgatgccagtgatgatgaagatgacgatgagaaacgccggatagttttttctgtgaaagaaaagtcacaaagacaaaaaattgctgaggaaataggaattgaggggagtgatgatgatgctttagtaactggagaacaggatgaagagctcagccgatgggaacaggagcagataaggaaaggaattaatatccctcaggttcaagccagtcaacccgcagaagtgaatatgtactaccagaacacttaccagacaatgccttacggctcatcctatggcattccttatagttatacggcctatggatcatcagatgccaaatctcaaaaaacagataatacagtccctttcaaaactcccagtaatgagatgactcccgttactattgatttggtaaagaaacagcttaaagacaggtagggcagatcaacttcttaaagacctgtccgctagctttctgttccctcaggcaacatgtagtctggggtagcagatgcagaatatcagcaaagaagattcactggcccagcttcaaaagctaaacagaagatgacttcatactttgttctgctaccttcttggattacttctgtggaagcctcgaaaaaaaaaaaaaaa

SEQ ID NO: 57719 - DNA, 620 bp, Homo Sapiens
gtaagcaacaggacatatcccagcctcggacatgtctgtatgatccaaggtacccaaagtcagacagagtaaactcaagcctggcactggctttctgccgcttcatgtgctttggaaaaagcaggagaagcaatagcagcaggagtccccagcagctggagccgcaagaatgaactgcaaagagggaactgacagcagctgcggctgcaggggcaacgacgagaagaagatgttgaagtgtgtggtggtgggggacggtgccgtggggaaaacctgcctgctgatgagctacgccaacgacgccttcccagaggaatacgtgcccactgtgtttgaccactatgcagtgggcacgtattcctctgggacggtgccgtggggaaaacctgcctgctgatgagctacgccaacgacgccttcccagaggaatacgtgcccactgtgtttgaccactatgcagttactgtgactgtgggaggcaagcaacacttgctcggactgtatgacaccgcgggacaggaggactacaaccagctgaggccactctcctaccccaacacggatgtgtttttgatctgcttctctgtcgtaaaccctgcctcctggacattgtggtaaga

SEQ ID NO: 57720 - DNA, 4020 bp, Homo Sapiens
gcggaatgttcaactcctaactgcggcggaaacgtgggagccgcgcgggccgctgtcgtcccaacccccgccgccctcgtcgcgcgcggggcctccgcgcccccggctgctgctcacgccccgcccgggagccagattttgtggaagtataatactttgtcattatgagatgtcgtctctcggtgcctcctttgtgcaaattaaatttgatgacttgcagttttttgaaaactgcggtggaggaagttttgggagtgtttatcgagccaaatggatatcacaggacaaggaggtggctgtaaagaagctcctcaaaatagagaaagaggcagaaatactcagtgtcctcagtcacagaaacatcatccagttttatggagtaattcttgaacctcccaactatggcattgtcacagaatatgcttctctgggatcactctatgattacattaacagtaacagaagtgaggagatggatatggatcacattatgacctgggccactgatgtagccaaaggaatgcattatttacatatggaggctcctgtcaaggtgattcacagagacctcaagtcaagaaacgttgttatagctgctgatggagtattgaagatctgtgactttggtgcctctcggttccataaccatacaacacacatgtccttggttggaactttcccatggatggctccagaagttatccagagtctccctgtgtcagaaacttgtgacacatattcctatggtgtggttctctgggagatgctaacaagggaggtcccctttaaaggtttggaaggattacaagtagcttggcttgtagtggaaaaaaacgagagattaaccattccaagcagttgccccagaagttttgctgaactgttacatcagtgttgggaagctgatgccaagaaacggccatcattcaagcaaatcatttcaatcctggagtccatgtcaaatgacacgagccttcctgacaagtgtaactcattcctacacaacaaggcggagtggaggtgggtagccccgacagcaggccacagcgtctggctttcaaagaccatcactcgtctcaatgaagaagtgaaccagagatctgaatgacagtcctgatttctgaccatagcttagggaaaaagaaaaggttttttttatgattttggaactcttataagtcctgcatttcataagcaagaaatagtgtttctccaagcttgttgccttgtgtaaagtatttgaaaagaatattgaggccggtcgcagtggctcacgcctgtaatcccagctctttgggaggccaaggcaggcagatcacctgaggtcaggagtttgagaccaccttgaccaacatggagaaaccctgtctctactaaaaatacaaaaaattagccaggtgtggtggcacatgcctgtaatcccagctactcaggaggctgaggcaggagaatcacttgaacctggaggcagaggttgcagtgagccgagatcatgccattgcactccagcctgagcaacaagagtgaaaaactccatctcaaaaaaaaaaaaattgaaatcctgtcttctgagacaaaagatggttaccagacatttctctgtgtttactttgttaggaagctttgtcctctgttgtgtaagaaacaagaatactgtttaccttgaaattcgctgagcactgtgtctgctagtgaagggggatagggagacatcaaaaatactcttaaaagaaaacttgatatcataaatcctattaaagcttgttaaataaatttagtaatgagaaaatgactgcatgagtggaagagtaaacccaggatgaaacatttgagccaggtcacatgatgcatgactataaatagcatgtttggaagctgacattattccccccctgactcagcggagatttaggtaacttcatctctgctcccgatagccgtgggcagtaacatgacgccttacgccatctgctgatgccaaatgaatactgcatgcactttgaaaattactgcgttgtttactcctgttactagatacttctttgggctttctgtttgttgttttacaataaccttatttatttttattctttgaaatatcttatctagggctagtgaggtaaatgaatttttatttagggatacaaaaattatacagtgagctcaagtctaggtataagggacttttttctgggctgagataattaacaaaacaaaacatttaagtaatatttgttttttgcagtaagagatcagtatacatgtcatcagatcattctcctttaaaatccatatatgagttcccattactcttaagacaaagaccagaatacttgggcacagtggctcatgcctgtaatcccagcacttcaggaggccaaggctggtggattacttgagcccaggagttcaagcccagcctggtgacagagcaagaatcattctcaagaaatgaaaaggaccagaatacttaagaagactcaccagaccctcattactgtggcctcaccagtgtcagcttaagaagatcattctccccttaatttctggctttcagtccctcaacagatgcgtatttctccccttttcaggatctttacaagcagtttcctctctttgaagcttatcccatttcagctgtgtaccacgcctgccgtcacaccccaccttaactcctgttcatcattcacatggcagttgaataacacgtctgcagggaaacacttcctgaccccaggccagatcaggttccactttatgtgctctgagagcatctccttcataggctttgctgctattggaattaagaagtaattcgggccaggcacagtgctcacgcctgtaatcccagcactttgggaggccaagtcaggtggatcaacgtcaggagatcgagaccatactggctaacacggtgaaaccccatctctactaaaaatacaaaaaattagccaggcatggtggcgggtgcctgtagtcccagctacttgggaggctgaggcaggagaatggcgtgaacccgggaggcagaggttgcagtgagctgagatcgcgccactgcactccagcctgggcgacacagcaagactccgtctcaaaaaaaaagaagtaattcggcagttagttgtttaatgtgtgtctcacgggctgaaatataagagaggcagacaatcacgtttgttcatcactcacagcatcaaaatgtgccttgaacacagcatttgctccgtaaatatttggggaagcaagagagaaaattaccatggtggtaataatataaaaagagattgtgatattatacaagagaatataaatatgtatgtttgccatgacaaaagtacttcttatgttcattcattcattatccattcattgaacttctgctggtgtgagaacgactgttgccattcgggtactgggctgtagcgatgagcacaagagtcccagggcatgtggagctctccagcccgagtgtccaatgttaaactattaaatatattcaaaactatcgcatttctattttgacaagtattatgacagagaaatatactagatgtctgagagcatatggccatgaaatctgatctagtccaaggacatagtaaaaggattttggagaaaatgctatttgatctattaccgaagggattagtaagattttaataccaagatagggagtcttttaaagtatgtcaacaaggccaggcgtggtagctcacacctgtaatcccaacactttgggaggccgaagtgaaagactgcttgagcccagaagttcaagactagcctgagcaacgtagacctcatctctactcacaatttaaaaattagctgggcattgtgactctaacctgtggtcccagttactcaactcgggaggctgaggtgggaggatcacttgagctggggaggtcaaagctgcattgagccgagatctggccacgacactccagcctgggctacagagtgagatcctattcaaaaaaaaaaaaaaaaaaaaaaaaaaaaaaaaaaaaaaaa

SEQ ID NO: 57721 - DNA, 3839 bp, Homo Sapiens; identical to SEQ ID NO: 24515

SEQ ID NO: 57722 - DNA, 3213 bp, Homo Sapiens
ggcacgaggctcccgtttgcgccgcgttcagctgctcccgaacaacttttctgccggcccagaggccccagggcgtcgcagcgccgcgtgcggcccactcacgggccggatggactccaacactgctccgctgggcccctcctgcccacagcccccgccagcaccgcagccccaggcgcgttcccgactcaatgccacagcctcgttggagcaggagaggagcgaaaggccccgagcacccggaccccaggctggccctggccctggtgttagagacgcagcggcccccgctgaaccccaggcccagcataccaggagccgggaaagagcagacggcaccgggcctacaaagggagacatggaaatcccctttgaagaagtcctggagagggccaaggccggggaccccaaggcacagactgaggtggggaagcactacctgcagttggccggcgacacggatgaagaactcaacagctgcaccgctgtggactggctggtcctcgccgcgaagcagggccgtcgcgaggctgtgaagctgcttcgccggtgcttggcggacagaagaggcatcacgtccgagaacgaacgggaggtgaggcagctctcctccgagaccgacctggagagggccgtgcgcaaggcagccctggtcatgtactggaagctcaaccccaagaagaagaagcaggtggccgtggcggagctgctggagaatgtcggccaggtcaacgagcacgatggaggggcgcagccaggccccgtgcccaagtccctgcagaagcagaggcgcatgctggagcgcctggtcagcagcgagtccaagaactacatcgcgctggatgactttgtggagatcactaagaagtacgccaagggcgtcatccccagcagcctgttcctgcaggacgacgaagatgatgacgagctggcggggaagagccctgaggacctgccactgcgtctgaaggtggtcaagtaccccctgcacgccatcatggagatcaaggagtacctgattgacatggcctccagggcaggcatgcactggctgtccaccatcatccccacgcaccacatcaacgcgctcatcttcttcttcatcgtcagcaacctcaccatcgacttcttcgccttcttcatcccgctggtcatcttctacctgtccttcatctccatggtgatctgcaccctcaaggtgttccaggacagcaaggcctgggagaacttccgcaccctcaccgacctgctgctgcgcttcgagcccaacctggatgtggagcaggccgaggtcaacttcggctggaaccacctggagccctatgcccatttcctgctctctgtcttcttcgtcatcttctccttccccatcgccagcaaggactgcatcccctgctcggagctggctgtcatcaccggcttctttaccgtgaccagctacctgagcctgagcacccatgcagagccctacacgcgcagggccctggccaccgaggtcaccgccggcctgctatcgctgctgccctccatgcccttgaattggccctacctgaaggtccttggccagaccttcatcaccgtgcctgtcggccacctggtcgtcctcaacgtcagcgtcccgtgcctgctctatgtctacctgctctatctcttcttccgcatggcacagctgaggaatttcaagggcacctactgctaccttgtgccctacctggtgtgcttcatgtggtgtgagctctccgtggtcatcctgctggagtccaccggcctggggctgctccgcgcctccatcggctacttcctcttcctctttgccctccccatcctggtggccggcctggccctggtgggcgtgctgcagttcgcccggtggttcacgtctctggagctcaccaagatcgcagtcaccgtggcggtctgtagtgtgcccctgctgttgcgctggtggaccaaggccagcttctctgtggtggggatggtgaagtccctgacgcggagctccatggtcaagctcatcctggtgtggctcacggccatcgtgctgttctgctggttctatgtgtaccgctcagagggcatgaaggtctacaactccacactgacctggcagcagtatggtgcgctgtgcgggccacgcgcctggaaggagaccaacatggcgcgcacccagatcctctgcagccacctggagggccacagggtcacgtggaccggccgcttcaagtacgtccgcgtgactgacatcgacaacagcgccgagtctgccatcaacatgctcccgttcttcatcggcgactggatgcgctgcctctacggcgaggcctaccctgcctgcagccctggcaacacctccacggccgaggaggagctctgtcgccttaagctgctggccaagcacccctgccacatcaagaagttcgaccgctacaagtttgagattaccgtgggcatgccattcagcagcggcgctgacggctcgcgcagccgcgaggaggacgacgtcaccaaggacatcgtgctgcgggccagcagcgagttcaagagcgtgctgctcagcctgcgccagggcagcctcatcgagttcagcaccatcctggagggccgcctgggcagcaagtggcctgtcttcgagctcaaggccatcagctgcctcaactgcatggcccagctctcacccaccaggcggcacgtgaagatcgagcacgactggcgcagcaccgtgcatggcgccgtgaagttcgccttcgacttctttttcttcccattcctgtcggcggcctgaggatggtccgccacgaggagcttccagtgcatgttgccatgaggcctttccccagtgtggccccagcccgacaggcatgcaccagtgccgcctgtgcccacgtgtgcagactgtggctgcagagaccttgcgaccatgtgtagattgcgtggaccccgacaaagggaaggctgctgctgaataccaagtgtgttgggaattgcatgccatctccaccctgagcctgacctttctgagtgacatgggtgtgccaggctagactaggaggttccggtgtctggaaaagcactttacagatgagattccctctcctcccccaccttcaagcaccctgttccctctttctttcttttgtgttggatttgtttaaaaaccaaataagcatctgtgtaacctccaaaaaaaaaaaaaaaaaaaaaaaaaaaaaaaaa

SEQ ID NO: 57723 - DNA, 3183 bp, Homo Sapiens; identical to SEQ ID NO: 27495

SEQ ID NO: 57724 - DNA, 2891 bp, Homo Sapiens
ggcacgaggccctgaggggagccgctgaccagcagcatggaggaccccgccgcgcctgggaccgggggcccgcccgcaaatggcaatggcaacggcggcggcaaagggaagcaggcggcgcccaagggccgcgaagcgttccgaagccagcggcgggagtcagagggctctgtggactgtcccactctggagtttgagtatggagatgcagatgggcatgcagccgagttgtcagaattgtatagttacactgagaacctggaattcaccaataacaggaggtgctttgaagaagatttcaagactcaagtgcagggcaaggaatggctggagttggaagaagatgcccaaaaggcctatataatgggactcttggaccggctagaggtggtcagtagggaacggcggctgaaggtggcccgggctgttctctacctggcccaaggtacttttggggaatgtgattcagaggtcgatgtgctacactggtccaggtacaactgcttcctgctgtatcagatggggaccttctccaccttcctggagctactccacatggaaattgacaacagccaggcctgtagcagtgcccttcggaaaccagctgtctccatagctgatagcacagagctcagggtgctgctgagtgttatgtacctaatggtggaaaatattcgcctggagcgagagacagacccctgtgggtggagaacagcccgggagaccttccgcactgaattaagcttctccatgcataatgaggagccttttgcccttttactcttctccatggttaccaagttctgcagtggcctggctcctcacttccccataaagaaggtcctgctcctgctctggaaggtggtcatgtttaccctcggtggatttgagcatctgcagactctcaaagtacagaagcgggcagaattgggcctgcctccactggctgaagacagtatccaggtggtgaagagcatgcgtgctgcctccccgccctcttacactcttgacctgggagagtctcagctggcacccccaccctccaagctgcgaggccgccgtggctctcgaaggcaactcctcactaagcaggacagcctggacatctacaatgaaagggatctcttcaagactgaggagcccgccacagaggaggaagaggagtctgctggtgatggagaacgaaccttggatggagagctagacctgctagagcaggaccctctggtgccacctccaccctcacaggcacccctctctgctgagcgggtggcttttcccaagggcctgccctgggccccaaaggtcagacagaaggacattgagcacttcttggagatgagcaggaacaagttcatcggattcaccctggggcaggacacagatacattggttggattacccaggcccatccatgagagtgtgaagaccctaaagcagcacaagtatatctccatcgcagatgtgcagatcaagaatgaagaggagctggagaagtgccctatgtctttgggggaagaggtggtaccagagacgccatgtgaaatcctctaccagggaatgctgtacagccttccgcagtatatgatcgctctgcttaagattctgctggctgcagctcccacctctaaggctaagacagactctatcaatatcctggcagatgtcctacctgaggagatgcccatcactgttctccagagcatgaagctgggcatcgatgtgaacaggcacaaggagattattgtaaagagtatctctaccctgcttctgctactcctcaaacacttcaaactcaaccatatctaccagtttgaatatgtatcgcaacatttggtatttgccaactgcatccccttgatcctgaagttcttcaatcaaaatatcttgtcatacatcactgccaaaaacagcatctcagtcctggattatccttgctgtaccatccaggatttgccggagcttactactgaaagtctggaagctggagacaacagccagttctgctggaggaacctcttttcctgcatcaacctcctgaggctgctcaataaactgaccaaatggaaacattcccggaccatgatgctggtagtgtttaaatcggcaccaatcttaaagcgggccctcaaggtcaaacaggccatgctgcaactttatgtcctaaagctactaaagttacagaccaagtacctggggcgccaatggaggaaaagcaacatgaaaaccatgtcagccatttaccagaaagtgcgtcaccgcatgaacgatgactgggcttacgggaatggtgagtcttcccaaagctcttgacttcctggagtttcctggggtttagacaaaactaaataaatatttatcactcctcttttggcatgaattgttacatattttagatgaaaaaatatgtgattataggtcaggcgctgatacaccaaactttaaggttatgcctcaaattctagtatgtacccttgtcctatgtaaactatgaaaatccgttttataaaacaagtaaattgagagataattaattgcctttccaaaacattcttttaaatgacagctttctccaaaagatttaaattaaaacaactttttattattacaaagcagttagaaaaaaagatagaaaatacaagtaaacaaacattttactatattatatttatgccatatttgtactatgcagaaattgccaccattaacatcttattgtatattcctccagatctttttctatgcatatacatgcatattttatcaaaatgaaagcaagttatgtatgctattttgtaattttctcttttaacattatctctaccttttcatgtcagtacattttcatttcatctaataaagttcatattcacaaaaaaaaaaaaaaaaaa

SEQ ID NO: 57725 - DNA, 2731 bp, Homo Sapiens
  misc_feature (2578)..(2578): n is a, c, g, or t
gacacaagaccaagtttgaaacagatgcaaataaactaaaatacagctctaatgtctttttctgctattctgtctcccttttcctctttgtctgtaaatgtaaggaatttgagacaaagaggaaaagggagacagaatagcagaatcttgactttgatagtcaagatcttgttcaagacttggcacttgatctttttgtaaacctagtattatgttatggtcaagtgggaagcatgaatttaaatgtagtatttaaaagattacttggtcttggctttccaatctgtgggagtgtttggatcattttatacacacacacacacacacacacacacacacacacctttttttttttttgatatgaggtcttaccctgtcacccagactagagtgcagtggcgcaatcttagctcactgcaacctctgcctacctggctcaagggatcctcccacctcagcctccagagtagctgggactacaggcacatgccaccaagcccagctaatttttcatatttttggtagagatggggtttcactctgttgcccaggctggtctcaaactcctgagctcaagtgatccacccaccttggccttccaaagtgctgggattacaggtgtgagctactgcacctggtacattattataatttaataatagtgacaggaaaaggtaaaaattgcaagcaacaataataaccaataatgcagaaatacatataaaatgttaactgtaaaggcagatattgttgcctatatcagccaatgtagatcttctggttttatacttactggtatactataaatgaaatttagtgacagcatactgtataccaaactagagtttacccattgttatttcttatttagatttttagatacattgtcttttgattctaacattggcattatcttaatttaatctctgtatatttttcttctttttggaaatatgcgtttgtaaaagcttaccttataagctactatggtgaccttggcctatcagatgggtgttctcttaaaccgttttatactgctttataccagactcaaaattgccaacatagttatctgctaattctcaataacttaaagccacattatttttgctagagtaattagtactacattgtttatttctagatgcactttaatattcatgtcaccagagtaatttagttttactgttttattaatctgattgattaagtctatcccaatatgtctctgcagttgggtgacccaatatgtctctgcagttgggtgacccaatatgtctctgcagttgggtgactacagaaataattcatgcagattacctcgctatttgtatcatattatatacaaatgacatactctagtgcatttgaaatgtaatttaatggaatcttgtagtttacaaaattaagattgtctttaaagtaaatcattattcctttaatttactcctctcatgacccctgtaactgtttttcacttcagttcaacatacatttatgccttgcctcctgtataccagccagtaggtgctggggttgcaaaataactaagatcaacccatacatgctggaagctctcaatctagtaggagaggatagacacgaaagctcataatttggttggtttggttttgagacagggcagtctctgtcgccagctggaggcagcggcatgatctcagctcactgcagctttgacctcccaggctgaagtgaccctttcacctcagtacccaaaagtagctggaattacaggtgcccacctgccagaaaactcagttttacttaaattatttattttcaacgtgtagctcatgaagatactaactttaaatggcagggagtagattgagaatcatcatggaagacctttttttttttttcttgagatggagtctcactccgtcacccaagctggagtgcaatggcatgatcttggctcactgcattctccacttctgggttcaagtgattctcctacctcagcctcccgagtagctgggattacaggcatgcagcaccacacccagctaatttttttatttttagtagagatggggtttcaccatgttggccaggctggtctaaaactcctgacctcaggtgatccacctgcctcagcctcccaaagtgctgggattacaggtgtgggccaccacacctggcccatcatggaagactttctgatggtgatgtttgaattgggttttggagagtgaattagaatgttttgaactaatacagtaaaggacagtagaaagaaggaacaacatggacagagaccttaaggcatgaaatgtcattctgtattcagttagacgtttagtcttgatagaaggattttttccttagaacagattacacctatatgataagattttattttgtttttatttaataatagttcagttaaaatataagcccaaaattgctccataaaatttggcagcagttatgctattgacagcatataaaaagcactcaatcgagctaggtgcagtggctcatggctgtaattccagcactttgggaggccccagcaaaaggatcacttgattcaaggaatttgagaccagtntgggcaacatggcaagactctatctgtatgaaaaaaaaaattttttaattagctgggaatagtgatgtgtgcccttgcagtgagctgtgatttgctctactgcactccaccttgagtagcagagtgaaactgtctttgaaaaaaaaaaaaaaa

SEQ ID NO: 57726 - DNA, 2591 bp, Homo Sapiens; identical to SEQ ID NO: 23078
  misc_feature (2074)..(2074): n is a, c, g, or t
  misc_feature (2077)..(2077): n is a, c, g, or t
  misc_feature (2585)..(2587): n is a, c, g, or t

SEQ ID NO: 57727 - DNA, 2220 bp, Homo Sapiens
ctccgccccgccggccgcgggcgcgggggacgtcagcgctgccagcgtggaaggagctgcggggcgcgggaggaggaagtagagcccgggaccgccaggccaccaccggccgcctcagccatggacgcgtccctggagaagatagcagaccccacgttagctgaaatgggaaaaaacttgaaggaggcagtgaagatgctggaggacagtcagagaagaacagaagaggaaaatggaaagaagctcatatccggagatattccaggcccactccagggcagtgggcaagatatggtgagcatcctccagttagttcagaatctcatgcatggagatgaagatgaggagccccagagccccagaatccaaaatattggagaacaaggtcatatggctttgttgggacatagtctgggagcttatatttcaactctggacaaagagaagctgagaaaacttacaactaggatactttcagataccaccttatggctatgcagaattttcagatatgaaaatgggtgtgcttatttccacgaagaggaaagagaaggacttgcaaagatatgtaggcttgccattcattctcgatatgaagacttcgtagtggatggcttcaatgtgttatataacaagaagcctgtcatatatcttagtgctgctgctagacctggcctgggccaatacctttgtaatcaggatgttgccttcctggagaaactgattaaagatgatatagagcgaggaagactgcccctgttgcttgtcgcaaatgcaggaacggcagcagtaggacacacagacaagattgggagattgaaagaactctgtgagcagtatggcatatggcttcatgtggagggtgtgaatctggcaacattggctctgggttatgtctcctcatcagtgctggctgcagccaaatgtgatagcatgacgatgactcctggcccgtggctgggtttgccagctgttcctgcggtgacactgtataaacacgatgaccctgccttgactttagttgctggtcttacatcaaataagcccacagacaaactccgtgccctgcctctgtggttatctttacaatacttgggacttgatgggtttgtggagaggatcaagcatgcctgtcaactgagtcaacggttgcagaaagtttgaagaaagtgaattacatcaaaatcttggtggaagatgagctcagctccccagtggtggtgttcagatttttccaggaattaccaggctcagatccggtgtttaaagccgtcccagtgcccaacatgacaccttcaggagtcggccgggagaggcactcgtgtgacgcgctgaatcgctgggtgagaatggcagtcacccccctttcctttcaggtccccgtccatcaccatccgacctgctggtgagggtgacgcgtgctcgtgtatgggaactgaggcccacaggaggagccgccctgccagtgctgggcctgctctggagttctgttccccattgcgttaccacctcacgagctgggtcacctctggcaagtccttctggcattgctccctcactttccttgctgctgtataaggctgtgagacaacaggcaaaaggtgggctgcagggcagctgcggtgggttctggtgagcctgggcagcacagccgggagccccaggcagagtctgccgagcatctgcagctggtagtgtggagccaggcctgcactttgatagcgttttgggcactgaatagcagctctaggatttgagtctgaagggtcttgtgaacagtgtgggatggcggcagcagcggttctagccaatgctggacacgcccagcctagcagggttggcagataagtcctggtacatccatgctggggctcagcacagctgtgagagaccacagagctgagtgtctcaagcagaaaggaactggtcataaacgaaatgaatcaatgcaggttactaagcagtgtcaagtagcatgttttatgacaacaactacaactccctgcccgccactaggagaaaagacgctgggggcagaccacatgtcagcagtgggtgtcgcttagtaatatattgtgggtcattgttattttcttctttttgtttacttgtatttcctaaatttttctacaatgaacttgtattaataagaaaaaaccataaaatttactgtttttaaaaaaaaaaaaaaaaaaaaaaaaaaaaaaaaaaaaaaaaaaa

SEQ ID NO: 57728 - DNA, 2187 bp, Homo Sapiens
gaagttgaaaccgggaagtttgctctaacatttccagagaaggtattaagtcatgatgcaggaatctgcgacagagacaataagcaacagttcaatgaatcaaaatggaatgagcactctaagcagccaattagatgctggcagcagagatggaagatcaagtggtgacaccagctctgaagtaagcacagtagaactgctgcatctgcaacaacagcaggctctccaggcagcaagacaacttcttttacagcagcaaacaagtggattgaaatctcctaagagcagtgataaacagagaccactgcaggtgcctgtgtcagtggccatgatgactccccaggtgatcacccctcagcaaatgcagcagatccttcagcaacaagtcctgtctcctcagcagctacaagcccttctccaacaacagcaggctgtcatgctgcagcagcaacaactacaagagttttacaagaaacagcaagagcagttacatcttcagcttttgcagcagcagcagcaacagcagcagcagcaacaacagcagcaacaacagcagcagcaacaacaacaacaacagcagcaacaacagcagcagcagcagcaacagcagcagcagcagcaacagcatcctggaaagcaagcgaaagagcagcagcagcagcagcagcagcaacagcaattggcagcccagcagcttgtcttccagcagcagcttctccagatgcaacaactccagcagcagcagcatctgctcagccttcagcgtcagggactcatctccattccacctggccaggcagcacttcctgtccaatcgctgcctcaagctggcttaagtcctgctgagattcagcagttatggaaagaagtgactggagttcacagtatggaagacaatggcattaaacatggagggctagacctcactactaacaattcctcctcgactacctcctccaacacttccaaagcatcaccaccaataactcatcattccatagtgaatggacagtcttcagttctaagtgcaagacgagacagctcgtcacatgaggagactggggcctctcacactctctatggccatggagtttgcaaatggccaggctgtgaaagcatttgtgaagattttggacagtttttaaagtaggttttttacttttttttggtggggggcgggggctggattatatgggcattttaggcacattgtaaataaacaaaagatgaaggaggaatgtaaaagtccattataagtcatacttcaagatttttgtgggttccaacaagtggattagtaagatcaggcttcatcttttcattaagatattttacaaatcatttagtaaagatttttgaatgaatgaaaaatattagcctacaataatatgtcattaatcactggagacatttataacagaactatttataaaatagaattctcttaagttttaagtttctaattaatattatgtgagtcatcctaatatatatatatatatatatatatatatatatatatatatatatatatatttcagtaaacatattttgaaagttcgttttttaattacaggctttatatattttttaaaatagtagtatttagtatatacatgtaactacaagaattaaaagtgaaagtttatactggctaaaattaaaaaaactacatttcatttacattgttactttttgcccttagaaacatcaagaaacacacatggctatatgtttgtataacagattacatggcttctctagcttaaaaccaaaactttgtgtattcttaatttttaatagaaaattttatttttaaaaaaatcataaggggttctttttcaagtgaaaatcttcatctttcatgaaatgttttccttacacaattctggtgtacaagagatctaaacagagagctacagataggcttatggagatgagtaacttcacaggctgagactcttatgttgtcatggtgcagctaacagggtgagtgaactgtttcatgcttcatcaacaattaagttaattagctcatttgaaattgcactgctttgttgccaggatgttggcagaaacatcaaaaagatgtgtttacaaatggaagactgactacagggtatagagcaaaagcaccttaacaaccaggcacaagtacttggcatcacaataactttataaatgaat

SEQ ID NO: 57729 - DNA, 2050 bp, Homo Sapiens
gtgagatgggcttgcctctagagacttatctttggaactttcccagtgatctgtggaccacaatgtgatttttgttttgttttgtctgatgcagcttccatgaggcaggctgaacctgcagatatgcgcccagagatatggatcgcccaagagttgcggcgtattggagacgagtttaacgcttactatgcaaggagggtaatgatgttttctttacccgcttttctgctcacaccctccccttccacactatatttttttaaaaagacagtgacttcttgtaactacatgctaattctggaaatgattactgttgcctagttgtgacctttcattgtttctcctttcccatttttcatttgttttatgactaagtaatggcacttaaataaaataatacagtaggaggcagcaaaggaattttatgagcacagactttaaaacaatgctaaaaaagggattatttatagactttgagatagtctagaaatactattaacataggtttcaatccatgtagtgtgtttctgtactccccttgtgcattttaggtcaaagttaaaggtaatttttaaacaacatcttttgtcacttagcgcatgggagcgatgccagcactcatgtaaaagactctcctgcaatttgcagggtggcccgaggaagcagggagccattgcccttgcagagcccattgctgtctttggacatttaattgttgaaatgtattaggaggccgctaatcaatagcctgtaatttgggctgtaaaaactttatattatagataattgccacttattttgagctatgttcttgattttttaaaaattttagcctatgtcatcttctgtagttagtagaagcggtgttttttgtttgttttacctgggggcaatgtaggtgaccatttggacacctttttcacatgggacacttttgtttgtttgtttgtttgtttgtgtgtgtgtttgtttttgagacggagtcttgctctgtcaccaggctaaaagcagccaccattgcactctagcctccacaagagcgaaactccatctaaaaaaaaaaatagttcaaaacactggatgatgctgtggatagtgacaccgtgatcttcaaagccacagacacccgtcttgatacttgttagattaaaaacagtccattgtctggaatcacacttaatggtccattgttaaatattgggggcagaaatctgggaaggtaatgggaggccgttttgggaaataatgaattcaaattacctgctgtcttcacaagggaattatcctctcttggcaagcgagtgtatctcactgtgctgctttaggatggatattaaccttttaaatgttgagtgtctttatttgcttaatgctattacaatgccttgtctaaagtgttagtcttttattgccacgagccttgcaaagcctgacaggatattttcccgtttttccagttagagaaatagaggaagttgtcgtgtagttgtcatgtattcagtccacttaagggcagtggggaagcgtttgagacggagctgtggaggctgaatccttgaaggaggaggtgagagaggcacaggtgagcgcaaagtcccagtgcatgtcccctcttctctcccgatgcagtgtcattcccaggtgaacctgccgggctgaacggcctggcccctctattcagtcggagttttactactccagtggattttggtaacttcatttggaaataatttcagacttacaaaaatgttgcaagaatgacacaaagaaccacccttttatatctgccccacttgttttcatgttttccctctttgcacacatgtacaatttatttcagaaaaaactacagacatgatactgcttttcctacactaaaaatacttcagtgtatatttcccaaaaataggagtaatcccttatgtaaccacagtgtaattatcaaaattcacaaatagtgttacaaaactattatctgatctatggaccttattcagattttaccacttgtcccaacaatgcccttctcagaaaaaaaaaaaaaaaaaaa

SEQ ID NO: 57730 - DNA, 2034 bp, Homo Sapiens
ggcccgggcgcgcggcgcttcgccatgtacaccttcgtggtacgcgatgagaacagcagcgtctacgccgaggtctcccggctgctcctcgccaccggccactggaagaggctgcggcgagacaaccccagattcaacctgatgctgggagagaggaatcggctgcccttcgggagactgggtcacgagcccgggctggtacagttggtgaattactacaggggtgctgacaaactgtgtcgcaaagcttctttagtgaagctaatcaagacaagccctgaactggctgagtcctgcacatggttccctgaatcttatgtgatttatccaaccaatctcaagactccagttgctccagcacagaatggaattcagccaccaatcagtaactcaaggacagatgaaagagaattctttctcgcctcttataacagaaagaaagaggatggagagggcaacgtttggattgcaaagtcatcagccggtgccaaaggtgaaggcattctcatctcctcagaggcttcagagcttctcgatttcatagacaaccagggccaagtgcacgtgatccagaaatatcttgagcaccctctgctgcttgagccaggtcatcgcaagtttgacatccgaagctgggtcttggtggatcatcagtataatatctacctctatagagagggtgtgcttcggactgcttcagaaccatatcatgttgataatttccaagacaaaacctgccatttgaccaatcactgcattcaaaaagagtattcaaagaactacgggaagtatgaagaaggaaatgaaatgttcttcaaggagttcaatcagtacctaacaagtgctttgaacattaccctagaaagtagtatcttactacaaatcaaacatataataaggaactgcctcctgagcgtggagcctgccattagcaccaagcacctcccttaccagagcttccagctcttcggctttgacttcatggtcgatgaggagctgaaggtgtggctcattgaggtcaacggtgcccctgcatgtgctcaggaaaagcccaggaccagattgtaagccagatggtaaggaattaacaccaatatttcatagagtctcctaaaaaatagaagagaagaaaatactcctcaattgagaagagtgtcctcaactttatgaggtcactcttaataccctgataccaaaaccagacaaagatgtcacaagaaaagcaaatagcagaccaataatctcttgggaatacaaacggaaaaaatcttcaacaaaatactagtaaaccaaatccagcaacatagaaaaaggattatacattatgactaagtgggacttatcctaagattacaaagtttggaataactcatgttctcttgtaagtggaagctaggctgagcacggtggctcactcctataatctcagcacttttaggaggccaaggtgggcagatcaaatgaggccaggagtttgagtccagcctgggcaacatgattaaatctggtctctataaaaaatacaagaattagccaggcatggtggtgcatgcctgtaatccctgctactctgatggctgaggcacaagaatcgcttgaacctgagaagaggaggttgcagtgagcagagatcgcacaactgctctctgtcctaggtgacagagcaagtcctgtctcaaaaaaattaaaaagtgggagctaaacattgggtacacatggacataaagttgggaagaggccagtcgcggtggctcacgcctgtcatcccagcactttgggaggccaaggcgggcggatcatgaggtccggagatcaagaccatcctggctaatatggtgaaaccccgtctccactaaaaatacaaaaaattagccgggcgtggtagcaggcgcctgtaatcccagctactcaggaggctgaagcaggggaatcacttgaacctggaaggcggaggttgcagtgagccgagattgcgccactgcactccagcctgggtgacagagactctgtctaaaaaaaaaaaaaaaaaaaaaa

SEQ ID NO: 57731 - DNA, 1985 bp, Homo Sapiens
gtggctccattttccatttgagctcaaatattttgctgcttcctctgtagctgccagacctgctcttgctgctgctcaggtagaacatctgggaggtcccttgctgaccactggaagaagatgagctcgagctattggagtgagacgagcagcagcagctgtggaacccagcagctcccagaggtgctgcagtgccagccccagcattaccactgctaccatcagtcaagccaagcccagcagcctccagaaaaaaatgtagtgtatgagcgagtgaggacctacagtgggcccatgaacaaggtggtgcaggccttggaccccttcaactcacgggaagtgctctcccctctcaaaaccacctcctcctaccaaaatttggtttggagcgaccattctcaggaactccattctccaactttaaaaatatctacatgtgccccaagtactctacatataacccaaaatactgaacaggaacttcattctccaacagtgaaacttactacatatccacagaccactattaggaaatatgtagtacaaaatcctgaacaggaaccactgtctcaattcctaagaggaagccatttcttcccaggaaacaatgttatttatgaaaaaacaataagaaaagtggagaagctaaatactgatcaggggtgccatcctcaggctcaatgccatcatcacattatccaacagccccaggtcatccactctgcacactggcaacaacctgattctagccagcaaatccaagccatcacaggaaataatccaatttctacacatattggaaatgaactgtgccatagtggatcaagccagatttgtgagcaggtgataattcaggatgatggccctgaaaaattggaccccagatattttggagagttgcttgctgatctgagccgtaagaatacggatctatatcactgcttattagaacatttgcagagaattggaggaagcaaacaggactttgagtctacagatgagtcggaagacattgaatcattgattcctaaaggattatcagagtttacaaaacagcaaatacgctacattctgcagatgaggggtatgtctgataagtcactccgactagtgctgtccacatttagcaacatacgggaggagcttggacatcttcaaaatgatttgacatcactggaaaatgacaagatgagacttgagaaagatttatcattcaaagacactcaattaaaagagtacgaagaactcttggcatcagtgagagcaaataatcaccagcagcagcaaggacttcaagactcaagttcaaaatgccaggcattggaagaaaacaatctctctcttcgacatacactatcagacatggaatacagactaaaagaactggaatattgtaaacgtaatttagagcaagagaatcaaaaccttagaatgcaggtttctgagacttgcacaggcccaatgttgcaggctaaaatggatgagattggcaaccactacacggagatggtaaaaaacttgagaatggagaaagatagagagatctgcagactgaggtcccaattaaaccagtaccataaagatgtttcaaagagagaaggaagttgtagtgacttccaatttaagcttcatgaactgacaagcttgctggaagagaaggattccctcataaagcgtcagtcagaggaactctccaagttgcggcaagaaatatattcctctcataaccaaccctccactggtggaaggactactattaccactaaaaagtacaggacacaatatccaatcctaggcctcctatatgatgactacgaatatataccaccaggtagtgaaacacagactattgtgattgagaaaacagaagacaaatacacttgtgtaagttcacttgggcatttttagccctattttgacgatatatgtacagccttttaaaattgaggtaaaatatcaagtgaactaaaaaaaaaaaaaaaaaa

SEQ ID NO: 57732 - DNA, 1952 bp, Homo Sapiens; identical to SEQ ID NO: 24879

SEQ ID NO: 57733 - DNA, 1891 bp, Homo Sapiens
ggcacggggtggatcacttgaggtcaggagttcgagaccagcctgaccaacacgatgaaaccctgtctctactgaaaatacaaaaattagctgggtgtagtggcaggcacctgtaatcccagctactcaggaggctgaggcaggagaattgcttgaacccagaaggttgcagggagccaagatcacaccactgcactctgtcttaaaaaaaaataataaattaaaatagaaagttaaaacataggaatatataagcacatatttccttagctatcagaaatgtgagtgtgaaaaagacaaataatatgctggtgtcataatgaaaataattttaaccttgcagagccccccaagacctttaaaaacctctgggctgcgtgtcaggatacagtggtctccaagctaggcacagttcttgcctttgttgtactggatgctgtggtgctgtggaagcccatggtggggggttgggtctaacagacttgtggcatcaggaagggtacttggagagacagacctgaagtggagactagcctgggacaacaggtgtagtggtggatggagcagcatgtgggaggcccagaggcctcacctgaaaacctcaacgaagctcataatggctgcgtgttaatattgcatatgctgggatgataccagcagtttgagttctctggcttcagcgtgatatgattttatccacttgtttattttcagaggcacatgtagctgttctcaattcccttctctgtatgacttataggaagctaaaggcttccttgtgttagagagcttcctatttcaagtgctgagctgggtttgtcaagctttgaaaatgcagacagagccatgaaacctaagggggactcagaggaagtgtccatgtgcaggagagacaaggctgaattaaaaggcatgattaatcacaaaagagtggaagagtgatgcttgagagttgaggacgtgagtaaaacagaagtagaactgctcatttgatgtcatcacgttatctcaagatgagccctcttggcctcagacagtgggtagcattacattatatgttagctccgcgcccccacgcccaccctccttctttgaaatgatgtctaaattagaggtgtaactatcccaccaggtgcaacttgagccttcctttgccctcctgtagctgtcgtgggaggggggcctgctttcttgggcacagactgtttggtcagctgagccacagaaatgaggccaggcctgttttgctctctgtctatgcttgattgcaaggaacactgatgatatcagagggctttcttacctcaagcccttctggcttaaggacaaggttatttctttcatttctgtctgcaaactgtggtagtgtattcgatttcaaggattctgggatgaattcttcaatgataagaacctgctattattgtccctgctttacagctccagggattggcagcctcattcttcaaaagttgcacacctttagggccttgggaggtacaggcaccagcaaggagtcagaaggaatgaaagctggagagatgcggcccacactggaaagacaggaggaaaggagagagaaagcgcctcggccaggcacagtggctcatgcctgtaatcccagcactttgggaggctgaggcgggagatcacctgaggtcaggagactgagaccagcttgaccaacatggtgaaaccccatctctactaaaaatacaaaactagccgggcatggtggcgagtgcctgtaatctccgctacttaggaggctgaggcaggagaattgcttgaaccaggaggcggaggttgcagtgagctgagatcgtgccattgcactccagcctaggcaacaagagcaaaactgcatctcaaaaaaaaaaaaaaaaaaaaa

SEQ ID NO: 57734 - DNA, 1755 bp, Homo Sapiens
cagtgaggggggtcggcgcgcgtgtctacgcggacgcaccggctaagctgcttctgccgccgccggccgcctgggaccttgcggtgaggctgcgcggggccgaggccgcctccgagcgccaggtttattcagtcaccatgaagctgctgctgctgcacccggccttccagagctgcctcctgctgaccctgcttggcttatggagaaccacccctgaggctcacgcttcatccccgggtgcaccagctatcagcgctgcctccttcctgcaggatctaatacatcggtatggcgagggtgacagcctcactctgcagcagctgaaggccctgctcaaccacctggatgtgggagtgggccggggtaatgtcacccagcacgtgcaaggacacaggaacctctccacgtgctttagttctggagacctcttcactgcccacaatttcagcgagcagtcgcggattgggagcagcgagctccaggagttctgccccaccatcctccagcagctggattcccgggcctgcacctcggagaaccaggaaaacgaggagaatgagcagacggaggaggggcggccaagcgctgttgaagtgtggggatacggtctcctctgtgtgaccgtcatctccctctgctccctcctgggggccagcgtggtgcccttcatgaagaagaccttttacaagaggctgctgctctacttcatagctctggcgattggaaccctctactccaacgccctcttccagctcatcccggaggcatttggtttcaaccctctggaagattattatgtctccaagtctgcagtggtgtttgggggcttttatcttttctttttcacagagaagatcttgaagattcttcttaagcagaaaaatgagcatcatcatggacacagccattatgcctctgagtcgcttccctccaagaaggaccaggaggagggggtgatggagaagctgcagaacggggacctggaccacatgattcctcagcactgcagcagtgagctggacggcaaggcgcccatggtggacgagaaggtcattgtgggctcgctctctgtgcaggacctgcaggcttcccagagtgcttgctactggctgaaaggtgtccgctactctgatatcggcactctggcctggatgatcactctgagcgacggcctccataatttcatcgatggcctggccatcggtgcttccttcactgtgtcagttttccaaggcatcagcacctcggtggccatcctctgtgaggagttcccacatgagctaggagactttgtcatcctgctcaacgctgggatgagcatccaacaagctctcttcttcaacttcctttctgcctgctgctgctacctgggtctggcctttggcatcctggccggcagccacttctctgccaactggatttttgcgctagctggaggaatgttcttgtatatttctctggctgatatgatggagttttgctctgttgcccaggctggagtgcaatggtgccatctcagctcactgcaacctctgccgcttgggttgaagcgattatcctgtctaagcctcccgagtaactgagccagccatgtttgttaataaaaatggggacaatactgtatatatatggttatattttagctttttcacttttcagtatctcctgaggcttttctcatgtcattaaatatttttctaatttaaaaaaaaaaaaaaaaaaaaaaaaaaaaaaaaaaaaaaaaaaaaaaaaaaa

SEQ ID NO: 57735 - DNA, 1753 bp, Homo Sapiens
cccgggcccgaccgtcatggagcggtgcggggcctacgcctgttccgtgtgaggcgcatcgctgccgccgccgccgacgccgccttcgtttgtcgaggcctccggaacccccgccgcctcccggagcccctcgcccttggcagcctgtcaccgccccctgggcgggctcgaatgcgcgtccggtgaaggtgcaggcccggcgccgccactgccgcagccaggagatggttcgggcctagcggagccgggactggagcaacatgaaccgtgaagaccggaatgtgctgcgtatgaaagaacgggaaaggcggaatcaggaaattcagcagggcgaagacgccttcccacctagctctcctctctttgcagagccatacaaagttactagcaaagaagataagttatcaagtcgtattcagagtatgcttggaaactacgatgaaatgaaggatttcataggagacagatctataccaaagcttgttgcaattcccaagcctacagtaccaccatcagcagatgaaaaatctaacccaaatttctttgaacagagacatggaggctctcatcagagtagcaaatggactccagtaggacccgcacccagcacttctcagtctcagaaacggtcctcaggcttacagagtggacatagtagccagcggaccagcgcaggtagcagtagtggcactaacagtagtggtcagaggcacgaccgtgagtcatataacaatagtgggagcagtagccggaaaaaaggccagcatggatcagaacactccaaatcacgttcttccagccctggaaaaccccaggctgtttcttcattaaactctagtcattccaggtctcatgggaatgatcaccatagcaaggaacatcaacgctccaaatcacctcgggaccctgatgcaaactgggattctccttcccgtgtacctttttcaagtgggcagcactcaactcaatctttcccaccctcattgatgtcaaagtccaattcaatgttacagaaacccactgcctatgtgcggcccatggacggacaggagtccatggaaccaaagctgtcctctgagcactacagcagccaatcccatggcaacagcatgactgagctgaagcccagcagcaaagcacatctcaccaagctgaaaataccttcccaaccactggatgcatcagcttctggtgatgtgagctgtgtggatgaaatcctaaaagagatgacgcattcatggcctccccctctaacggctattcatacaccatgcaaaacagaaccttccaaatttccttttccaactaaggagtctcagcagtccaattttggcactggagaacaaaggctcaagtgatcctcctgcctcagcctactgagtagctgggactgtgggcacatgccactatgcctggctgattttttaaatttttagtagagatagggtctcactatgttgcacaggctggtctcgaactcctgagctcaagtgatccacctgcctcgcctcccaaagtgttgggattactggtgtgagccaccatgccctcgtatcctaatttttatgatctaatgggtagtagtgggttgagctgaaaaattgttatgctttaaaaaattcaagaactgtaagtcattggagatcaaaatacactacttttattaaaaaaaaaaaaaaaaaaaaaaaaaaaaaaaaaaaaaaaaaaaaaaaaaaaaaaaaaaaaaaaaaaaaaaaaaaaaaaaaaaaaaaaa

SEQ ID NO: 57736 - DNA, 1678 bp, Homo Sapiens
ccacgcgtccggcggacggttcctactgcggctgggcaccggctccgctcccgcgtctgcccgcgctccagctgcgcctggcccggccccggcccggctcggcgtggccccggcctccaagcgaaggcgccgctgccgctgggccgctcccagggccatgaggaagcggcggcagccactgcggcccgcgtcaaggtgaccggccgggactgcggcggcggggagagcggcggacttctccagacaggttatgttacctgcagaggctgccctgaagctccctgtggcctggagactatgtacaagaggaatggtctgatggctagcgtgttggtcacctctgccactccacagggcagcagcagctcggactctctggagggccagagctgcgactatgccagcaagagctatgatgccgttgtcttcgatgttttgaaagtgaccccagaggagtttgctagccagattacattaatggatatacctgtgtttaaagctatccagccggaggaactagccagctgtggatggagtaagaaggagaaacacagtcttgcccctaacgttgtggcctttacccggaggtttaaccaggtcagtttttgggttgtacgagaaattctaacagcacagactttaaaaataagggcagaaatcctcagccattttgtgaaaatagccaagaaacttctagaactcaacaaccttcattctctcatgtctgtggtatcagcattacaaagtgctcccatcttcaggctgacaaaaacctgggctcttttaaatcgaaaagacaagactacctttgagaaattggactacctgatgtcgaaagaagataattacaagcggacacgggaatatatccgaagcttgaagatggttccaagtattccctatctaggaatctatcttctggatttaatctacattgattctgcatatcctgcctcaggcagtatcatggaaaatgaacaaagatccaatcagatgaacaatattcttcgaataattgctgatttacaagtttcctgcagctatgatcacctcaccaccctgccccatgtgcagaagtacctgaagtccgtacgctacattgaagagctccagaagtttgtggaagacgacaactacaaactgtcgctcagaatcgaaccaggaagcagctctccaagactagtctcttccaaggaagatcttgcagtctcccatctcagcagcctgtcacatcaaggtcaagcagaagaggcaagactcaaacccacctctggccaacaccctgcctggatgtggcccagctcctcacgagtaccagcggctcccccagcatctgctgctccgcgctccccgtggcctaggaatctaagaaatgatcaaggtcaaccaggtgcagtggctctcacctgtaatcccagcactttgggaagccgaagcaggaggatcacttgagcccaggagttcaagaccagcctgggcaacatggcaaaaccccatctctacaaaagtatataaatgatctgggcatggtggtgcgtgcctgcagccccagctcctcagggcttaggcgagatcgcttgatcccaggagggggaggctacagtgagccgtgatcgcgccaccgcgctccagcttgggtgacagagcaagaccttgtctcaagaaaaaaaaaaaaaaa

SEQ ID NO: 57737 - DNA, 1648 bp, Homo Sapiens
ggggcttccttcccatctcgctcttgggtcatgcctggccagcagaaagcagctccataggggaggagagccacgcaggatctcacagctgcagtctaatagtaacacagaggattcagcagtggccaccatgggttctgtgaattccagaggtcacaaggcggaagcccaggtggtgatgatgggcctggactcggcgggcaagaccacgctcctttacaagctgaagggccaccagctggtggagaccctgcccactgttggtttcaacgtggagcctctgaaagctcctgggcacgtgtcactgactctctgggacgttggggggcaggccccgctcagagccagctggaaggactatctggaaggcacagatatcctcgtgtacgtgctggacagcacagatgaagcccgcttacccgagtcagcggctgagctcacagaagtcctgaacgaccccaacatggctggcgtccccttcttggtgctggccaacaagcaggaggcacctgatgcacttccgctgcttaagatcagaaacaggctgagtctagagagattccaggaccactgctgggagctccggggctgcagtgccctcactggggaggggctgcccgaggccctgcagagcctgtggagcctcctgaaatctcgcagctgcatgtgtctgcaggcgagagcccatggggctgagcgcggagacagcaagagatcttgatccagacagagcagcatatctttgctcatacaaactagtagaaccagctgatccttgagaaatttacgcttagtctatcaaacaagaaatgctggcttggcccggtggctcatgcctgtaatcccagcactgtgggagaccacggtgggggaatcccttgagcccaggagttggagagcaacatcacaacaccccatttctactaataatcaaaaaattggccgggcatggtggcatgtgcctgtagtcccagctacttgggaggctgaggcaggagaatcgcttgagcccaagaggtagaggttgcagtgagccaagatcgcgccactgcactccagtctgggcaactgagcaagaccctgtctcaaaaaaataaaaaaagataaacatggtgttaccatttgacccagcagtttcatacccaggagaattgaacgcatatgtccacatagaaactcgtacacagaagccaaaatgtggaaacccacgtgtccatcaacagatgaacggttaaacaaaatgtccatccatagaacggaatattattcagtcataaacagaatgaagtactgtaagtgaaaagccagttactacatattgtgtgattccatttatacggaatttctagaataggcacatccatagagacggattagtggttgcttaagactgggagggagggggaaataggaggtgacagctaatgggcagttttatttttgatgtaatgaaaatgtgcttacataagccgagcaggcataaacagaaaaagtgccctaagattgtgataatggtacaattctgtcaattgcataattggtggatgatgtgtgaattatgtctcttaggataacagctttactggcgttaccagaaaaagataaaataattacattccgaaaaaaaaaaaaaaaaaaaaaaaaaaaa

SEQ ID NO: 57738 - DNA, 1587 bp, Homo Sapiens
ggcacgagggcagagcatgtttgggacataacaaaggatctgagtagtaaacaccgtacgccacccaactcctcttgtaacgccatcgcgcgtggcattgtgttgggttctgcgtgtgtggcatcggagtcgtggaatttagggggaacaaggcttttccccccgtccccccggggtctcccttgggtgggggcgacacggccaagggcggcgcgccctgggggtgcccgggggcgcttcttccccagggcgttacgcaccggcggcccggcgcggaggagctactctcctcctggtgaggtggaaattccagcaagaatagaggtgaagacaagccaccaggactcaggagggaaacgctgaccattagaaacctctgcataagacgttgtaaggaggaaaataaaagagagaaaaacacaaagatttaaacaagaaacctacgaacccagctctggaaagagccaccttctccaaaatggatatgtttcctctcacctgggttttcttagccctctacttttcaagacaccaagtgagaggccaaccagacccaccgtgcggaggtcgtttgaattccaaagatgctggctatatcacctctcccggttacccccaggactacccctcccaccagaactgcgagtggattgtttacgcccccgaacccaaccagaagattgtcctcaacttcaaccctcactttgaaatcgagaagcacgactgcaacttgctgtctgcttggaaaatttcactcacaagccgcagctttgcctgactcagtgcaatccaaggccatcatctctggtgaacttcccttgactcctccctccagccacttgcagaaatgcaaatcctgggcacccacaggctgtttgggggcctgtatagaagctgtgggcagaaaccagaggccactgtggtactgctggactcctgcagccaaaggacaaaagggcgagactacgggccgtctgggcaaacagagagaagccactttattccctgtggagtggaggatgctaggatgttgctgctccggcagacagaggcctttcgcttgagtcatcagccaacagactgaatgttatggttttagaaacccatacacaaagttgagtggttttttccatttctaaaatttaaaatgtatgtatttttaaaacacccacctgcatgtaatacacagcttgttcaggagttctcaaacagccccagcacccaccccatcccagaggctcaaccaaataaaaccaaaaccaggaggctgggtccttttaagcactggtaatttctacctgtaattccagccctttgggaggccgaggcaggcaggtcacctgaggtcaggagttcgagaccagcctggtcaacatggtgaaaccccgtctctactaaaaatacaaaaaaaattagccaagcttggtggtgcgtgcctgtaatctcagctactctggaggctgaggcaggagaatcacttgaacctgggaggcagaggctgcagtgagctgagattgtgccactgcactccggcctgggtgaaagagtgagactctgtctcaaaaaaaaaaaaaaaaaaaaaaaaaa

SEQ ID NO: 57739 - DNA, 1546 bp, Homo Sapiens
cccccttcttcccccgctggccccctccccggagggataatatggtctccggcgatggacgccccaaaagcaggatacgcctttgagtaccttattgaaacattaaatgacagttcacataagaagttcttcgatgtatctaaacttggcaccaagtatgatgttctgccttactcaatacgggtcttgttggaagctgctgtacgaaattgtgatggctttttaatgaagaaggaagatgttatgaacattttagactggaaaaccaaacaaagcaatgttgaagtgccctttttccctgcccgtgttcttcttcaagattttactggaataccagcaatggtggattttgctgctatgagggaggcagtgaaaactcttggaggtgatcctgagaaagtccatcctgcttgtccgacagatcttacagttgaccattctttacaaattgacttcagtaaatgtgcaatacagaatgcaccaaatcctggaggtggtgacctgcagaaagcaggaaagctctctccacttaaagtgcagcctaagaagcttccctgcagaggccagactacctgccgaggatcttgtgattctggagaactaggccgaaactcaggaacattttcttcgcagattgagaatacacccatcctgtgtccttttcatttgcaaccagtgcctgaacctgaaacagtgttaaaaaatcaagaagtagaattcggcagaaatcgagagaggcttcagttttttaagtggagttcaagagtttttaagaatgtggcagtgatccctcctggaactggaatggctcatcaaataaacttagaatatttgtcaagagtggtttttgaagaaaaagacctcctcttcccagacagtgtagtcggcacagattcacacataacgatggtgaatggtttagggattctggggtggggggttggaggcattgaaacagaagcagttatgcttggtctgccagtttctcttactttaccagaggtggttggatgtgagttaactgggtcatcaaacccttttgttacatccattgatgttgttcttggtattacaaaggtaagttaaagttgtggtagctctatgacttactgaacattatttttataaaaattgaagagctctatgagagcagggatttgggttcattactgcatcctcaggtctcttgacgttagccacatcatcatagttatcatagtaataacaacaaacagagcatttagtttgtactaataaatacaaagaaatttgttgtgttcacttatgttagctcatttagtccttataacaagcctgtgagatggatactattactattctcattgtaactctgagaaaactaaggtacagtagggtttagtgacttaccaaagggtcgaaggcctgagtagtaaggggtagagcaaagattccaggcagtcagattcttgagtccattgtcttaaccattatgccttattagtgccttgttgccttaataaacacttgctgactacaaaaaaaaaaaaaaaaaaaaaaaaaaaaa

SEQ ID NO: 57740 - DNA, 1421 bp, Homo Sapiens
agaactctttgcagtcaaacctacccaacccatccaggagctgctacacattgaggaaggggcagaatgaatgctgggaagcaactacaaagaacactgcacaatatggtttctagttttagggtttctgaactacaagtattactaggctttgctggacggaataaaagtggacgcaagcatgacctcctgatgagggcgctgcatttattgaagagcggctgcagccctgcggttcagattaaaatccgagaattgtatagacgccgatatccacgaactcttgaaggactttctgatttatccacaatcaaatcatcggttttcagtttggatggtggctcatcacctgtagaacctgacttggccgtggctggaatccactcgttgccttccacttcagttacacctcactcaccatcctctcctgttggttctgtgctgcttcaagatactaagcccacatttgagatgcagcagccatctcccccaattcctcctgtccatcttgatgtgcagttaaaaaatctgcccttttatgatgtccttgatgttctcatcaagcccacgagtttagttcaaagcagtattcagcgatttcaagagaagttttttatttttgctttgacacctcaacaagttagagagatatgcatatccagggattttttgccaggtggtaggagagattatacagtccaagttcagttgagactttgcctggcagagacaagttgccctcaagaagataactatccaaatagtctatgtataaaagtaaatgggaagctatttcctttgcctggctatgcaccaccgcctaaaaatgggattgaacagaagcgccctggacgccccttgaatattacatctttagttaggttatcttcagctgtgccaaaccaaatttccatttcttgggcatcagaaattgggaagaattactctatgtctgtatatcttgtacggcagcttacatcagccatgttattacagagattaaaaatgaaaggtattagaaaccctgatcattccagagcactaattaaagaaaaacttactgcagatcctgatagtgaaattgctacaactagccttcgggtatccttgatgtgccctttaggaaaaatgaggctgacaatcccatgccgtgcagtgacttgtacacatctgcagtgttttgatgctgccctctatctacaaatgaatgagaaaaagcccacctggatttgtcctgtgtgtgacaaaaaagctgcctatgaaagtctaatattagatgggtaagtatatcccttttaacagctgatatggactaatacaacagctgttggcaatgcctttgttcactacaacttactgaactaaattctaaataaattctactctagcatcaaaaaaaaaaaaaaaaaaaaaaaaaaaaa

SEQ ID NO: 57741 - DNA, 1420 bp, Homo Sapiens
cttgaacctttgtcacccctcacgttgcacaccaaagacataccctagtgattaaatgctgattttgtgtacgattgtccacggacgccaaaacaatcacagagctgcttgatttgttttaattaccagcacaaaatgccatcagtctgggacgtgatcgggcagaggtgtactcacagtagtgtaaatactgctgtaaatagttgtctgatggtggctttgacagtgagctagcttctgagttttcccttctttttatactgttttctgtgctggcttttttgaatcttcctaatttttcatctctttaacaaactcctatgaagttgaaaccgggaagtttgctctaacatttccagagaaggtattaagtcatgatgcaggaatctgcgacagagacaataagcaacagttcaatgaatcaaaatggaatgagcactctaagcagccaattagatgctggcagcagagatggaagatcaagtggtgacaccagctctgaagtaagcacagtagaactgctgcatctgcaacaacagcaggaggatgttgtctcttacacccaggttatttgttaaagtctttggatctatacttaactgatgacctagaagagcgattctcaaaagtgtgagtcctggaccagcagcaacagcatcaccgggaacttgttagaaatgcacattctcaggccactccctagacctactgaatcagaaaccctggggttggagctcagcaattaccctgcaggtaattctgatgcatgctcaagtttgagaaccactggcctagaagaaatgaactactgcaacttatgaggaatcatgagatccagctcacttttgctcaatacctatcaaaagcttgtcccagagtgattatggaggattgcatgcaggatacacacttcattaaatcctctaaaatctaactttgattaattaagtacagggttattgctgatagcctcataactctaccaccattataatggatctatataaaattgcttaatatcagtagcctaaatttaggagcactatagttttaaaaatacttaattggctactttatttaacaatgttttagggatgtcgttcagtatcttttccagtgtttgctacctaagatcccattggggtaaaaatataactcagatttcactgttaggaatagttctgtttgtgagcaacttacttcctttcatcttacacaatgaaccttgtaatttaattatgattttctcttcatacgagctgttagaaagctcagcattaaatttgtgactcacctctagcaaatatataacacttaatgatgtgactgtcctgattctaaaactttttctcttggttttttactttttaaataaaaacacatttaacgtaaaaaaaaaaagaaaaaaaaaaaaaaaaaa

SEQ ID NO: 57742 - DNA, 1403 bp, Homo Sapiens
cggccgcggggggcggggagagggtggctaggctcgcgggagctcgccgggcagggcgcctcccaggaaggcggggaggggagcgcctgtttacccaggagggctgtgctgatagcacgttcctcgagtttactttgctttccttgagtttattgtaaaggggtaaagttttcggatccgtcacgtgaccctgacaggtcctgcctatggcgcggcagaccacccacgccgagggccatggaactgcttaatagaaacaggcttgtaattgtgagtccgcgctgcactccgccgaaagcctccggcggcccagcgcgccggggtttttacactttccgttccttttgtaaagacggaggaggaggagaagaagaagaagaaaacggaggagaagaaaaagacgacaggggagacaaagagacccgcagcgacaaggcaagggggagacgagggaagactgggagaagacggaggagcggaggacgaggaaaggggggccagggaaaaaaaaggaattgatgtgaaatccaagcccagcgtccgcgccatcggcacccgcgctccgagcaggggttgacggccggctatggggaaggctactggccggaaagcgccgctgtggctgagagcgaagtttcagagactcttatttaaactgggttgttacattcaaaaaaactgcggcaagttcttggttgtgggcctcctcatatttggggccttcgcggtgggattaaaagcagcgaacctcgagaccaacgtggaggagctgtgggtggaagttggaggacgagtaagtcgtgaattaaattatactcgccagaagattggagaagaggctatgtttaatcctcaactcatgatacagacccctaaagaagaaggtgctaatgtcctgaccacagaagcgctcctacaacacctggactcggcactccaggccagccgtgtccatgtatacatgtacaacaggcagtggaaattggaacatttgtgttacaaatcaggagagcttatcacagaaacaggttacatggatcagataatagaatatctttacccttgtttgattattacacctttggactgcttctgggaaggggcgaaattacagtctgggacagcatacctcctgtaagtgtgtgatcatgctttctgatgtctgtgacttctctaggactcagtgtttctaatgttgcttatcattgtttgttccatttcagttttgaacaagaaataaaaacattgaaattcaaaaaaaaaaaaaaaaaaaaaaaaaaaaaaaaaaaaaaaaaaaaaaaaaaaaaaaaaaaaaaaaaaaaaaaaaaaaaaaaaaaaaaaaaaaaaaaaaaaaaaaaaaaaaaaaaaaaaaaaaaaaaaaaaaaaaaaaaaaaaaaaaaaaa

SEQ ID NO: 57743 - DNA, 1393 bp, Homo Sapiens
gaagaactggaactgggctggccatagggggaagcggcgcgttaaatccgccccctctccataccctactttcaaggggtgggcggtagaggggaggttggggttggagcagcggcgagggggcccctcccttgcacctccccccaccggacttggtcgcgcccgaagtgtaacactttctctttgtcggaggagctcctctgtttcctgtgcagtagctcccgttgcggcggcacccgtggcagccctggcggacgcaggagcgatggcagcgaccgatatagctcgccaggtgggtgaaggttgccgaactgtccccctggctggacatgtggggtttgacagcttgcctgaccagctggtgaataagtccgtcagccagggcttctgcttcaacatcctgtgcgtgggagagacaggtttgggcaagtccaccctcatggacaccctgttcaacaccaaattcgaaggggagccagccacccacacacagccgggtgtccagctccagtctaatacctatgacctccaagagagcaacgtgaggctaaagctcacgatcgttagcacagttggctttggggaccagatcaacaaagaggacagctacaagcctatcgtggaattcatcgatgcacaattcgaggcctacctgcaggaagagctaaagatccgaagagtgctacacacctaccatgactcccgaatccatgtctgcttgtatttcattgcccccacgggtcattccctgaagtctctggacctagtgactatgaagaagctggacagtaaggtgaacatcatccccatcattgccaaagcagatgccatttcgaagagtgagctaacaaagttcaaaatcaaaatcaccagcgagcttgtcagcaacggagtccagatctatcagtttcctacagatgatgagtcggtggcagagatcaatggaaccatgaacgcccacctgccgtttgctgtcattggcagcacagaagaactgaagataggcaacaagatgatgagggcgcggcagtatccttggggcactgtgcaggctgcacgagaagtttgaccgtctgaagaaactgcaccaggacgagaagaagaaactggaggataagaagaaatccctggatgatgaagtgaatgctttcaagcaaagaaagacggcggctgagctgctccagtcccagggctcccaggctggaggctcacagactctgaagagagacaaagagaagaaaaattaactctgctgtttgctgcatgctgcatgagacccagggtcctgtaatccatggctgtgtactgaatagtattccccgctacagctggactggactccatttagccttttaagccgagctttttttaatcttgtcttcagcagctgcac

SEQ ID NO: 57744 - DNA, 1343 bp, Homo Sapiens
cgctgccgcaggcgccggcgtctcagctgctcgccgccccccaccccagagtgcgtgcagggtgactcccgccacctttgcgaccctcctgagcttaggggactgcgagcgggagggagtctcaggcccccggccgcaggatggtggcggagcggtccccggcccgcagccccgggagctggctgttccccgggctgtggctgttggtgctcagcggtcccggggggctgctgcgcgcccaggagcagccctcctgcagaagagcctttgatctctacttcgtcctggacaagtctgggagtgtggcaaataactggattgaaatttataatttcgtacagcaacttgcggagagatttgtgagccctgaaatgagattatctttcattgtgttttcttctcaagcaactattattttgccattaactggagacagaggcaaaatcagtaaaggcttggaggatttaaaacgtgttagtccagtaggagagacatatatccatgaaggactaaagctagcgaatgaacaaattcagaaagcaggaggcttgaaaacctccagtatcataattgctctgacagatggcaagttggacggtctggtgccatcatatgcagagaaagaggcaaagatatccaggtcacttggggctagtgtttattgtgttggtgtccttgattttgaacaagcacagcttgaaagaattgctgattccaaggagcaagttttccctgtcaaaggtggatttcaggctcttaaaggaataattaattcttctaacgggatcgcagccatcattgttattttggtgttactgctactcctggggatcggtttgatgtggtggttttggcccctttgctgcaaagtggttattaaggatcctccaccaccacccccccctgcaccaaaagaggaggaagaagaacctttgcctactaaaaagtggccaactgtggatgcttcctattatggtggtcgaggggttggaggaattaaaagaatggaggttcgttggggtgataaaggatctactgaggaaggtgcaaggctagagaaagccaaaaatgctgtggtgaagattcctgaagaaacagaggaacccatcaggcctagaccacctcgacccaaacccacacaccagcctcctcagacaaaatggtacaccccaattaagggtcgtcttgatgctctctgggctttgttgaggcggcagtatgaccgggtttctttgatgcgacctcaggaaggagatgaggtttgtatatgggaatgtattgagaaagagctaactgcttgagtcagtataatggaggcagggaaatagtaataaaaaatgatt

SEQ ID NO: 57745 - DNA, 1261 bp, Homo Sapiens
cgcgccggagcgggacacgcatgcgccggtctggacccggcacccagtaacggactcgagctcctcccaccggaagtgggcagccgcgcagcgggaagagccggccgaagcgtggcggccacagactgtgggtaccgggtccgagggactcgcgcttttctctccgtgccatggcgccagcgaaagccacgaacgtggtgcggctgctactaggctccacagcgctgtggctttcgcagctcggctccgggacggtcgccgcgtccaagtcggtgactgcccacttggccgcgaagtggcccgagaccccgctgctgctggaggcaagtgaatttatggcagaagaaagtaatgaaaaattttggcagtttttggaaactgtgcaagaattagcaatttataagcaaacagaatcagattattcttattacaacttaatcctgaagaaagctggacagtttctagacaatttacacatcaaccttttaaagtttgctttctctataagggcatactccccagctattcagatgtttcagcagattgcagctgatgagccaccaccagatggttgtaatgcatttgtggttattcataagaagcacacctgtaaaattaatgagattaaaaagctgctgaagaaagctgcttcaaggactagaccttatctatttaaaggagatcacaaatttcctacaaacaaagagaacttaccagtggtgattctctatgccgaaatgggtactagaacatttagtgcatttcacaaagtattgtctgaaaaagctcaaaatgaggaaattctgtatgttcttcgccattatattcagaaaccaagctcacggaaaatgtacttatctgggtatggtgtggagctagcaattaagagtacagaatacaaagcactggatgatacccaagttaaaactgtgactaatactactgtagaggatgagactgaaacaaatgaagttcaaggatttctctttgggaaactaaaatcttagttttcaagcagcttctcaaataatgtccgctccagtttatgatgccattaaattaatgaaagacatttcacagaacttccccataaaagccagatctctaaccagaattgctgtaaatcaacatatgagagaagaaataaaggaaaatcaaaagtatattccagaatttcttccgaggtagtatggttttcttcataggataaagaataaaggctgtgagttaattaaaaaaaaaaaaaaaaaaaaaaaaaaaa

SEQ ID NO: 57746 - DNA, 1210 bp, Homo Sapiens; identical to SEQ ID NO: 25612

SEQ ID NO: 57747 - DNA, 1191 bp, Homo Sapiens
gaggaaacagccttctgcactcacagccgaagggaaagcagcaggttggggcttcttgtggccaacttcagagcctgtcaccaggaaaggtaagcatgggaggaaggaagatggcgacagatgaagaaaatgtctatggtttagaagagaacgctcagtcccggcaggagtccacgcggaggctcatccttgttgggagaacaggggccgggaagagcgccactgggaacagcatcctgggccagagacggttcttctccaggctgggggccacgtctgtgaccagggcctgcaccacgggcagccgcaggtgggacaagtgccacgtggaagtcgtggacactccggacattttcagctcccaagtgtccaagacagatcctggctgtgaggagagaggtcactgctacctgctctcggcccccggaccccacgcgctgctcctggtgacccagttgggtcggttcaccgcccaggaccagcaggcggtgaggcaggtgagggacatgttcggggaggacgtcctaaaatggatggtcatcgtcttcaccaggaaggaggacctggccgggggctccctgcacgattacgtgagcaacacagagaacccggcttcctagagcagcgtagacagctggtaaactgaagagcacaactatattcttatgaaggaatttgtacctttggggtattattttgtggcccgtgaccctcgttattgttacagctgagtgtatgtttttgttctgtggagaatgctatctggcattatggtaatatattattttaggtaatatttgtactttaacatgttgcataatatatgcttatgtagctttccaggactaacagataaatgtgtaatgaacaaagatatgttgtatgagtcgtcgtttctgtcagatttgtattgtttccaagggaaaagcttgggggaggactcagttcacaaaatgcaaaactcaacgatcagattcacggacccagagcttttccatgtgtttatattgtaaatatttttgatttcatcaaattatttattcattaaaagaaatttttgtgaagcacagtgagtgacaatcatttttcttaaggcctggaaacgattttctgtatgatgttactttatgtgaattctcatctcaataaatgatgacccgcaaaaaaaaaaaaaaaaaaaaaaaaaaaaaa

SEQ ID NO: 57748 - DNA, 1007 bp, Homo Sapiens
gcagtctccgattccccatcaccaattcggctggggcgccctgcaagccgcacggatgaacattctggcacccgtgcggagggatcgcgtcctggcggagctgccccagtgcctgaggaaggaggccgctttgcacgggcacaaagacttccacccccgcgtcacctgcgcctgccaggagcaccggacaggcaccgtgggcagatttaagatctccaaggtcattgtggtgggggacctgtcggtggggaagacttgcctcattaataggttctgcaaagacacctttgataagaattacaaggccaccattggagtggacttcgagatggaacgatttgaggtgctgggcattcccttcagtttgcagctttgggataccgctgggcaggagaggttcaaatgcattgcatcaacctactatagaggagctcaagccatcatcattgtcttcaacctgaatgatgtggcatctctggaacataccaagcagtggctggccgatgccctgaaggagaatgacccttccagtgtgcttctcttccttgtaggttccaagaaggatctgagtacccctgctcagtatgcgctgatggagaaagacgccctccaggtggcccaggagatgaagactgttcagagactgcccagccctagggcactgtgccaccctcattcctccagagcttgacccctggacatttgcactgactttatccagaccaaagagctgcctcttggtggcagtattcccacagaggggtagctgggatcatgctagtcacttcctgcccccaggcaccgtgccaaagactggatgccccctactcctcaggggactgtccagggcgcccagtggtagtgagggagagtgtctctgttcttttgctcagcctgctgggccctttgtgtttgaggatgcttaatgattccagcctctcactgtgccttatgcattaaaatttctttgttacgagcaaaaaaaaaaaaaaaaaaaaaaaaaaaaa

SEQ ID NO: 57749 - DNA, 976 bp, Homo Sapiens; identical to SEQ ID NO: 23561

SEQ ID NO: 57750 - DNA, 603 bp, Homo Sapiens
atggcgctcctgctgtgcttcgtgctcctgtgcggagtagtggatttcgccagaagtttgagtatcactactcctgaagagatgattgaaaaagccaaaggggaaactgcctatctgccgtgcaaatttacgcttagtcccgaagaccagggaccgctggacatcgagtggctgatatcaccagctgataatcagaaggtggatcaagtgattattttatattctggagacaaaatttatgatgactactatccagatctgaaaggccgagtacattttacgagtaatgatctcaaatctggtgatgcatcaataaatgtaacgaatttacaactgtcagatattggcacatatcagtgcaaagtgaaaaaagctcctggtgttgcaaataagaagattcatctggtagttcttgggaagatgtgccacctccaaagagccgtacgtccactgccagaagctacatcggcagtaatcattcatccctggggtccatgtctccttccaacatggaaggatattccaagactcagtataaccaagtaccaagtgaagactttgaacgcactcctcagagtccgactctcccacctgctaaggtag

SEQ ID NO: 57751 - DNA, 561 bp, Homo Sapiens
gcttaaacttcagatacccaagctgttcataaattagtgactacataagatagttctggttttacgactatagtgtgacactggttgagtcagtcagcttctctgggcctcatctgtaaaaggaaatggagagcaacattatctatactccctccctccctctatttctccctcccttccttcctccttcccttcctccctttcttcctcccttctccctttctctctccctccctgcctccctccctttcttccttctctgcctccttccctgtgattggggaaaataatagctcaagtaattttaaaaaaattcaatttagttatttctttagcatattactaaagacttagactcctaagactttccgtaagggaaactagatgtgctttgtagtgcagtcctaatttttaaaatttaaggagcccaggcatggtggctcacgcctatagtctcagaactttggatggctcaggcggaaggattgcttgagcccaggaatttgagaccagcctgggcaacatagcaaaacctcatctttaccaaaaaaaaaaaaaaaa

SEQ ID NO: 57752 - DNA, 386 bp, Homo Sapiens
tgggggacctcccttgggagatcaatcccctgtcctcctgctctttgctctgtgagaacgatccacctatgacctcaggtcctcagactgaccagcccaagaaacatctcacgaatttcaaatctgatctgctcaacttagcgactgaagattaatgctgcctgatcacctcagaagccccctggaccatcacagatgcccaacttcaggtgactctcaagtggagggcctctgaacccaagccaagccatcgcatcccctgtgatttgaaggtatatgcccgggtggcctgaagtaaccgaagaatcgcaaaagaagtgaaaatgcgctgccccgccttaactgatgacattccaccacaaaataagtgcaaatgccagtccttg

SEQ ID NO: 57753 - DNA, 850 bp, Homo Sapiens
atgctggaagccatggcggagcccagtcccgaagatccacctccgacccttaagccagagactcagccaccagagaaacggcggagaacaattgaggatttcaacaaattctgcagttttgttttggcatatgctggttacattccccctagcaaagaggaaagtgactggccagcctctggctccagctctccattgcgaggagagagtgcggccgacagtgatggctgggactcggccccctcagatcttcgaaccatccagacttttgttaagaaagcaaagtcatccaagagaagggcagctcaagcaggtcccacccagccaggacccccaaggtccactttctctcgtctgcaggcccccgacagtgctaccttgcttgagaagatgaagctcaaggactctctctttgatctggatgggcccaaagtggcatctcctttgtcccgtccctgtgctgccaacaccccctgaggctcctaggccccctgccacagtgcaccctgaaggagtccctcctgctgacagtgaaagcaaggaggtgggcagcactgaaacaagccaagatggagatgccagctccagtgaaggcgagatgcgggtcatggacgaggacatcatggtagaatcaggtgatgactcatgggatctgatcacatgttactgtcgaaagccctttgcagggcggcccatgattgagtgcagcctgtgtgggacgtggatccacctctcctgtgctaagattaagaagaccaacgtccccgacttcttttattgccagaaatgcaaggaactgaggccagaggcccggcggttaggggggcctcccaaatctggagagccctga

SEQ ID NO: 57754 - DNA, 2077 bp, Homo Sapiens
gccccctccagaagatgatcagctgcactccagtgcccccagatcctcgtggaaggaacggatccttaaagcaaaggtggtgacggtgtctcaggaggcagagtgggatcaaatcgagcccttgcttagaagtgaattagaagattttccagtacttggaattgactgtgagtgggtaaatttggaaggcaaagccagccctctgtcacttctacaaatggcctccccaagtggcctgtgtgtcttggttcgcctgcccaagctaatctgtggaggaaaaacactaccaagaacgttattggatattttggcagatggcaccattttgaaagttggagtgggatgctcagaagatgccagcaagcttctgcaggattatggcctcgttgttagggggtgcctggacctccgatacctagccatgcggcagagaaacaatttgctctgtaatgggcttagcctgaagtccctcgctgagactgttttgaactttccccttgacaagtcccttctacttcgttgcagcaactgggatgctgagactctcacagaggaccaggtaatttatgctgccagggatgcccagatttcagtggctctctttcttcatcttcttggataccctttctctaggaattcacctggagaaaaaaacgatgaccacagtagctggagaaaagtcttggaaaaatgccagggtgtggtcgacatcccatttcgaagcaaaggaatgagcagattgggagaagaggttaatggggaagcaacagaatctcagcagaagccaagaaataagaagtctaagatggatgggatggtgccaggcaaccaccaagggagagaccccagaaaacataaaagaaagcctctgggggtgggctattctgccagaaaatcacctctttatgataactgctttctccatgctcctgatggacagcccctctgcacttgtgatagaagaaaagctcagtggtacctggacaaaggcattggtgagctggtgagtgaagagccctttgtggtgaagctacggtttgaacctgcaggaaggcccgaatctcctggagactattacttgatggttaaagagaacctgtgtgtagtgtgtggcaagagagactcctacattcggaagaacgtgattccacatgagtaccggaagcacttccccatcgagatgaaggaccacaactcccacgatgtgctgctgctctgcacctcctgccatgccatttccaactactatgacaaccatctgaagcagcagctggccaaggagttccaggcccccatcggctctgaggagggcttgcgcctgctggaagatcctgagcgccggcaggtgcgttctggggccagggccctgctcaacgcggagagcctgcctactcagcgaaaggaggagctgctgcaagcactcagagagttttataacacagacgtggtcacagaggagatgcttcaagaggctgccagcctggagaccagaatctccaatgaaaactatgttcctcacgggctgaaggtggtgcagtgtcacagccagggtggcctgcgctccctcatgcagctggagagccgctggcgtcagcacttcctggactccatgcagcccaagcacctgccccagcagtggtcagtggaccacaaccatcagaagctgctccggaaattcggggaagatcttcccatccagctgtcttgatagctgctttcctcccagttaggacaagtgggaagctggagccaaggttgaagagtcacctcttcccattttagtacatcattaattgtcaaagcctgtgtgacacaactcagaatactaacctagactaatcccaggatgcttctgctggagcaaagatattgtttgaaggagagtttatggttttggattttaaacgggcagggtcttttttcctctcatttttgtggacaagagaggccttcgcctttatttttactctccctcttctgctgtccctgtgcagaggaaaaatgaagaattctcccagaagtgacttgtcaagacttaaaaaaaatgtttttaatgcaaaaaaaaaaaaaaaaaaaa

SEQ ID NO: 57755 - DNA, 2663 bp, Homo Sapiens
gatgctgctggggttggcctgaggtgggggccacttcctccaccccagtgggtatgtctgaggtcagccatggggatatctgggttgagattcaggttttggtgaatatggggcaggcgtccagatgtgtttgtgtcacctgctgcaacgctgtagccaatgaagattccagcgggatggcctgaccagcggggccggcactttggagccgtgggtgcagccaggtaccccgtgcagggcctgggaggctctccaggccacagtcctcagagcgtgttgggtcccatgttgtgtgtgggttccatgccctccacacagcaggagagggcttccctgaccacacctgccccctcagtcctgcttctccccagtaagcctgcactgtggggtctccataggaggagctggggaagctggggccctcccaggggtcctgatcgaccctgggggctcttggcctggtttcgtaagatggagcactgcaaaaggccatgctcagaaagcaaacgcagggcagggtgggcctcgagccggggctggaggggtctccacccttgctggcctgagagatggcccacatttcttacttgtgaccgccctgctcttcctggccgccccccccaggtggctgaacagggtgattttgttgtggtgaggggccaggatgtggcctggtgtgcagcctcagctccctgggttcaggcctcagaggtagcctgtgtgcaggaggcagagccccagcccctcccagccagagcccctccacaccagggactcctccttcacctgggaccaggagcctggggcacaccccagggtgggggagagggtaggaaggtctcccattgaatcctggcttcaggctctgccccgagaagtgtctgcggtgagggtgtgagccccgggctgatggcctctgaccccggcaacaggtgggaccctgactgactcgttcagctgcccccaagctgggctgcagagcatctgtttttctgctctccagtttcttttcttttttttttttttttttttttgagatggagtcttgctctgttgcccaggctggagtgcagtggcatgatctcagctcactgcagcctccgtctcccaggttcaagcagttctcctgcctcagcctcccgagtagctgggattacaggcgtgtgccaccacacctggctattttttttgtatttttagtagagatggggttttgccatgttggccaggctggtcttgaactcctgacctcaagtgatccacccgcctcggcctcccaaagtgctgggattacaggcgtgagtcaccgcgtcctgcctgctcttcctgtttctttcccaagggtcacactcagtagggagatgaaggtggaaacatccttgctgtggctttctggcctcagagcaggttttagaggaaggggccacaggctgcctagtgcatcctggctgtgggcagcccctttcctggagccctcctgcctaccccgtacctcccatctggctgcacagctccatccttagccacgcaaggggagaacatgggcagagtctccatccagcagctgggggttctggtggcactccctgtgcccctgctgctgctgggctgtgggtctgccctgcacccaggagccccacggtccatcccccacaccatgcccagcaccagggaggttgggcagacaagacctgggccatgccagccctctgtgcctcggttttcccactggttacacaggatggtcgcattttccctgcctacctcacagagctgttctgagggtgcatggaggagcactctgtcccaccaaggacaactagaaaccaaagccatctgacagccagtgcggtaagggcgggggatgtgtgtgtgaggtgtgcacaccccccgagaacctggccctggactggcctcacaggacaggaggcagccccttgtagagctagggctcagccccatcagtctcaaaggttaagccaccagtcaccaccgaggcacccctcaggcctggtggccactgtccactattacgtagacagaccccaccctcacccaggccagctgtgggccagtcccgccctgcaatctggtctgctgccttcctcttccatgttggtccccttggccactgtctctgggcatgcaagccagtgtcctggttcagtgcctcggccagagctggggcaggagaggggcctctgggtgagagctgggggtgtctctgcagggtactggcagccttgccacactgtcctcattcccagatggaaagacctgagtgcctctcgccttcctccgggaatgaattcctcatgaaaatgaccaggccacttcttccgagggccaggccgccccctccccgagacctgtcctgccgtccgcgggtgtgtggcctgtaggggactgagagctgggcttgctgggcacctctggaatctgaccctgtgggccaaagaagcaccactgtagtttctgcagacccccatgcggttcattgtgcattgtttggtttctaggatgtatgtgttgctagttttttttaatgaaaccctggattaatgtaaatagctttttggggaacggattctaatgtcacgtatgtgaccgtgtggactatttcaaggtgctgatgcaacactaataaacctggaggggccggc

SEQ ID NO: 57756 - DNA, 1534 bp, Homo Sapiens
  misc_feature (390)..(390): n is a, c, g, or t
gacaattattatatattacagagaggttatcatgcatatcattgaaacaaataaaatactttttatcacaacacagatacatatttgtcattttataaaaagccacacaatagaaacaagacaccaagatattataattatcttgtcgactcctgtataatagctaaacactcatcattcgcggtgcaagtactcaatagacgataagcttcctggaaacaagtacggttgtgcatgcgctaagagcacttcgacaccgagaagcaaatgctggtgttttatttgcggcgatccccgtgtcattcagtagtgctactgggatcgctggatgtttgagcaagtcgaccagtgtatttcgcacaatagtattggcaagacatagaacactgnatcatggcatactgaatggccgtgcaaagcaaatacattgtccgcgtataagataactcgggactgactaccattagggacaaagtcatagagcaattgcgtcgtattacacaatcttgcgtcgcgaaatatcgactaaggacctagaccatatcagctgaagaaatgcgtatcctcatctcaaatgcggacatggtcgtagattgaagcggactcctgtaattcagtggtacccctataggcgacgtagaacgtcgacatgcgttagtgcagtgccagcacgactagttggctatagaacagcggctcgaggtaactcaacgctgcggagactcatagtagacatcagttatggtcgatcgtagactctatgttccgagcccagatggagagccacatgagctaatcagggaacgctctagttcgtcctcgtgaagaatgcataggaccactaagtcttgcactcgcaagacttcagaatatctttcgtgcagcgttgaacagtcagtacattaacataggaggtaggcattcacacaatggcagcacttgttacagccagaataatctgtccctttagaagagacatttcaatctcgaagtcgacctgatagctcaatacgcaggagcgcggcatggcttcgcagtgactcgaaggactcacacatcaaagcgcgtgactaccttctagcagggtgaatgggagaatcccactataaaccgagctgacaataaccaacaagattcacgcattatgacaacagatggtaatagtatcaagcatatgtatccacagtatttagtgaaactccaaaaatagtatccaccatatataccaccaaatcaatcacaccccgattattaccagattatacataccacactcgctacaaccaagtgcacaaatcacaactatctctacaacacgacacccgatcacttactgaataaaactcaagatagcataacacaatcatatactatcactcgccgacgttctatatgatcaactaaaaacacaccagaatcaaatcaaacgccaattaaaatgaacagtagttcaacatgctctagcagaatcatcacgaccacacgtcttatatccctcctcacccatacaccgccaaacataacctaagaataa

SEQ ID NO: 57757 - DNA, 806 bp, Homo Sapiens
  misc_feature (10)..(10): n is a, c, g, or t
  misc_feature (535)..(535): n is a, c, g, or t
  misc_feature (699)..(699): n is a, c, g, or t
taaagaaaanattaaaagtttattgttcaaacaagaattacagaccacaatctagaagactcaaatcaagtggtaagaaattaatcttacagcagttacaacacagtttataatgcataaagggggggaatattttgaccttttttataattggctgttatacattctttttagggcaagttgagctgtttaagcttgttggtctatagctgattggtttaatttcagtgaatcatgctggcaaggatgtaaagcttacattttgcatttcatttatgatcagagacagcatttcaggaaaatcagaatgattagttttggttacacggttgcgggtagtcagccttagggtatttctaaactggggcttccatttttatttttcgttaataatacctgcatgagatgggcagctcaggtcttaaggtcacatacagtgcttcagtggtcaagtgttctgtttaaattagagtccaatagcaggctagtagctgccattcaaagggaatgtatatggcaaccatcttgggtaatntatatgtccaaaacccaagggcctggtgcatcctgatagcagtctcttgttgccgcagtatccaatctgtatgggtaagagtcaatgagacctgttagtccatgggcctacattaatgtcaggcccatgttaatgcatagtaggcctctcgagtctgctggtgntgagggccccattcagaagtggcttgggttgtgggtaattttactaaaagaggcaaaataatactcaaatgtgatacatggtatcttcaatagacaaacagccctac

SEQ ID NO: 57758 - DNA, 647 bp, Homo Sapiens
  misc_feature (634)..(634): n is a, c, g, or t
ttttttttttttttttttgctagtcacaaagcccaactttttattgaagtataacatacacagaaaagtgcccagatcaaaagtgtacagctccaagaatgttcacaaacggaaagcacccaggtaaccggcaaccagatcaagaaacagaacaccccagaagcaccacctcatgcccccttctggttactgtcttcttaggactgatctctacttgcaaccgcatggatgaattttgctgggttttaaactttatataaatggaatcctatggtgcatttttgccttatctcgttcaacactagggttggtgaatacactccaagttgggggtggagttgcagctcattcccattgcagtctgggattccatcgtgtgaatataccctaatgtgcttatccagccaacatgggcattggggtgctttcctgttcagggttattatggagagtgtttttgtgaagatttagagcatgtctctggatgaacacatgtacacatttctgtagggtatacacctaggggtggaattgttaggtcatatatatttacatccaactcaagctctttcatgaaagaagaaagaatgtactggatggagtttgctggctcaaagaattgacagaaaactanaagggaggtctgt

SEQ ID NO: 57759 - DNA, 2048 bp, Homo Sapiens
acaagccatttgctcccatacttagtttctctcaatttctgtggcagaattgaatattcttaaatgacacagcaaaaacatcacagtactcagaatagtgtaggcagtatgagtttcccccaggatgttcaaagttattggaagagcaaatggaaaaaaataacacgcgtaactgaaagatctcaaggagtaagaggattctgcatcttcatatggactttatggcatattgtattttccaaaaatggccacaacaatatttctggtaccatatgctgttccagaacttggatacacctccccttaaaaggtggtgtctaatgcacttccctttgcatataggccatcaatattaacttttgtttgtttgtttgtttgtttgtttgtttgagacagagtctcgctcgggcaccaggctggagtgcagtggcacggtctcggcttactacaacctccgccttccggattcaagtgattctgctgcctcagcctcccgaatagctgggattacagtgtttcagaatcacctgggatgatctgcatgaagattcctggcctccaccaaagacttactgaatcagaaaggaggcaagaggatgaggaatgcttaagaatctgcattaacaaactttacaaatgaatcttacaacatacagaagcatggaaactactgcctcaagggattatctcaacttgagtttaaacataggaattgctgactacctttaaaatgtaaaaatagtatctttatgggagggatgttgtttgggggcagctactaaatagtgaaatcattcctttaaaataccctcttaagtctgccccagttatccattttactggatagtcttggtatccagatgatttagggaaaaaaatagtagtagcaaactctgaaaacactcagtaaagttcattcttggtcttctcttcctaaatttgttttcaattgttagatttaaacactaaacaagaccaaaagagaactttattttacatgtctttattttacatttagaaccgttttatgatttacttaaaaaaaaaatcttttactattattagaagtattttttaaccaaaatcttgatttaggaagacttaagacattgtgcattattttaaatattttcatttcagtaactattaaaaataaattcacaattagggtttcaaatgtcctaatcatatctagtttgttctcatttaatattttatcaatcccatcatgtgcatacagaggttaaggtgatgtataaattttatatctttcaaacacattgatgctaatcagctcttgatctaattactatttcatttattcagaaatagcatttagacataaaaaccaatgtctcactttgtaaaataacctttggctaatttacacacatctaatacagcgtgttatataagttttaagtaatacaatgagtcactactatcattcagttttaaatatttttagtgttaacagggctgagaatatcatgtggttcagtcttctgaaggaagttatataataaaagcatagtgcctttgaacatgaagactatcctcaaggccagaaatcctacaaaggaactgaaaggagagattccagagaattgctctcctcatttttaatatgtaaagtgactgttttaagtcacttcattgaagacttaaggaagaaaacagtgttattatgccactgaataaagctacttaaaccagagtaattttgggatattaatcctaggctacataattaataggtcatcaaaacaaaaacctgtcagttattaggtgtaagttaacttcctatgccaagtaaggggtcacacttcacttcccccatttgtaaaatgaaaaggtggccaggccagtgccatttaggattctctgctaactgtaaaatgtggactgattttcttctgtttcttatagtccaggtgtatataaacttccagttctttaagtcaaaatttttatgcacataaccatgtcagtgtattgcccttagtttaaaaatgtacaactacataaataaaaactattgtttcttc

SEQ ID NO: 57760 - DNA, 1288 bp, Homo Sapiens
cccacgcgtccgcccacgcgtccgtgcttcctgacaggttcacttgaaccatctggagattggggaacaagggcaatgagttgaacatgtaggaagtttcatggcccagcccctcctgagagccctgaactgccaaccagactgagcccatcagagaataacacctcattttctgaggattctgataccttttcaatcagaaacagaagcaaagattctgcagctcccacagaaactcccagaaaccttgcggtgcttcacccttctgagatccttgagtccgaatgtgggagctaaccaggcacatcttcacaatgaaatcttcacaagctcagaaccatcaacttgctacactgtgttcctccagtgcccagttcacaggaagcactcaagaaaatcaaggctgaatcaaacaggactactgttctgaaagaatactcagactatgagtcttcctccagacaggcacgccatacaaccgactacacttgggctcactgaatgaatcacattcttctgctgtgcctcccagagatttcatcaaagcacccgcagtggccttctggaggctcctcaaactctccactcaatgtttcctgaaagtgtcgtgtttctcacctctagattgttattctcatcagttacatgtgggtttcacaaatttatttctcagaatgcaagtctgtctcttatatcctcgggaaacacacctttatatcccagttagtactgacaaaaattaaactagggaatggccaaaaacagtgcctttcctcactttaatctcactaaagtagataagactcaagttattttgttcttgcaatggcattgacaaatgtttgcaccaaaaaccatgttgaagttcattaaggaaactgtgatccaagatccaaggtcaaaaaaacaaattcatcaattcagcacaccaccaactcacaggctaagcatcttactgctaattcattgatgctgccatttgtcaagtgccaaattgaattattgatttgtcaataatttccttccgttggttacttatatagtatattgcaattcttgttgctgaagtcagctacactttttctatttgaaaaacaatttcttgcatttgggatttcaggtatagtgattgttacaaatatgaaggacttgaattaacagcaagttttcaagtaaaactttacttatgtataactgaatgagttcttaaagacatttactaacaattttccacaaactaaaaatttataaaacaataaataaaatagactttaaaaaaaaaaaaaaa

SEQ ID NO: 57761 - DNA, 749 bp, Homo Sapiens
  misc_feature (650)..(650): n is a, c, g, or t
  misc_feature (720)..(720): n is a, c, g, or t
ttttttttttttttttttgagctttcatatttattttgagatatataatttcaaaatatatatagtatataaacagacattcattaaaaaacaaacgaggaaaacgatgttaacataatttcagtaccctctctgaggtcagctttgaactcattcatactctgacaagctgagaatcactgtgcattctcaagcatagcacgctccacagttttaggctgcatcccccagatctgcatcacagccttcttgtagcattcttctgttggtcgatagtgagcagctaaccacagtcagaagacattggttctattgggatgagcactttattctttatttttggtctaaatgtacttaacttgagtaagtggtataaggtcctttcattagtctagatcaccagtgtatcaggagggtagtgtggggatgacagttgaggattctgaagttgactacaagggtttgaatcctggcacttattacgtgtgtagccttagatgagttatttcacctctacctcagttttcttatgtgaaacatgaaggtaatgaaaatagaaaaatgagaattgagaaatggatgtccatctgttgtacactaaatgttcagtgtccttatcagtgccatattcatcaccactagtcttttcncacccaacctctgcaggatgtgaagtgatagctgtgaatacccgctccacgagtcaaacctttatttatnaatgcgacgcagttctctgtacccttccc

SEQ ID NO: 57762 - DNA, 983 bp, Homo Sapiens
agcgggttatgggtaacgcggacgtggaagaacctcgtctgcggaggaaaaggtagatgttaaatggtaactacgcgcgagtttctgaggagccatgggaacagggaggagaaaagaataccaaaagtgacaacagtttgccaatcgcagtctttaatctgataaagcggttatctcgtcttgagtcccaggtgccgagtcaatccccatacacagccgccgccattgcctcgagtccttgtgtctgactgtctgttcctgctgctgtatgacacagcacctcgaggcaaggaaataagaaaactgcctctgatccaagcagagaaggtctgcctgtagatctgctgtagggcttgtcaccattggaagcaaggtcctacttcagtggcagatctggtggccttggagtggctgaagaccaccaccctccacagggctgggcccatgcacagccatccttccctaccttgaaactcctgtagcctgtaataccagctgtgggtactactctcagtgttggagatcatcaaaatacaattggaccagaccctttggaaataattctgtgtctcaaatgccctgtggagcacacacttaatcagttgatggctatggaattttccaacatcagctaaagagaagggatagagtggtgacttccaagcttcatgcagaaccggacaacagaaattgagagggaaatttctatgacagaagagagaaagaagaaaattgctggaataatgaccttgaatagaggaaatgggatatcatctggttctggagacagcctgtatttcttggatcttggcttccttccatcttcaaagccaacgatgaccagtgtagactttctatgctgcttcaatctgacatggagtccctgccttccacatctaaagtacccttgcaattacattggccaagataacccagaataatcttaaattaaactcagctgaatagcaaaaaaaaaaaaaaaa

SEQ ID NO: 57763 - DNA, 563 bp, Homo Sapiens
ttttaaagtgtaaacctgttttattattttactgaataaacatcattattggaatgttactgaggaagaaagtctgtggcttctcctccttttctaagagcctttaccctggcctactgccccgatgatgggcccacctcctttacacagaggcactcggggtcaactcagtcatgattcttctaaggctttagaaaatgcacaagagattacgaggtaccgaggaaaacaaacaatggattgttacagtacatacattctggtggaagtctgttctttctaaaagcaagtctctcagttttctttctgctttctgccaaactaaacaggactccgtaaacatactgacgaactggcctatagagcagagcggccggaggcaggtccttgttggcttcatcttcaatagaaacagcaattttgatttcacccctttataatttatgttgaaccttcgtcaggacatggaagatgtaggggtacatcagccccttcttgtgcctgtgctcggccactctcagcacctcaggtgcgacggggggcaggggaagtgtggtgatgtc

SEQ ID NO: 57764 - DNA, 619 bp, Homo Sapiens
ttttttttttttttttttgcaatgtagttttgttggaggccattttttattgcagacttgaagagctattactagaaaaatgcatgacagttaaggtaagtttgcatgacacaaaaaaggtaactaaatacaaattctgtttggattccaacccccaagtagagagcgcacatttcaaacgtgaatacaaatccagagtagatctgcgctcctacctacattgcttatgatgtacttaagtacgtgtcctaaccatgtgagtctagaaagactttactggggatcctggtacctaaaacagcttcacatggcttaaaataggggaccaatgtcttttccaatctaagtcccatttataataaagtccatgttccatttttaaaggacaatcctttcggtttaaaaccaggcacgattacccaaacaactcacaacggtaaagcactgtgaatcttctctgttctgcaatcccaacttggtttctgctcagaaaccctccctctttccaatcggtaattaaataacaaaaggaaaaaacttaagatgcttcaaccccgtttcgtgacactttgaaaaaagaacacctcttgcaaacaccggctctcgacccccgccgctg

SEQ ID NO: 57765 - DNA, 409 bp, Homo Sapiens
tttttttttttttttttttttaaacactggttttaacatttattacatacatagaacatataagaatttatagagcaatgaaaataccacatttgacatttgtattgtactgggaaagatttatatgtatttgtataaaaaataaataaaggggataatctcttgggatttccccaaaatacagcatccttttcatctttttccattatgtaaatatggtatgatagaaatataatatgctgggaagtgatagacatcatgacatatcaaaatgtattatatatacacatatatatacatgtacatatttattgaagtataatttatatacaaaatatacaaattccaaatatgaaattcagagttttgacaaatgtccacaccaatgtaaccatagtcaatcaagaca

SEQ ID NO: 57766 - DNA, 735 bp, Homo Sapiens
  misc_feature (629)..(629): n is a, c, g, or t
  misc_feature (682)..(682): n is a, c, g, or t
ttttttttttttttttttagatgctcaaagcctgtttattaaattgtattgaaattgaaacgcttgaaacagatttcattcctgcttattttctaacagtggttaaaacttggtaacttcaagttgacatggatttcagaattcaatgtaatttcaataatattataatagaacaaacttagggttaccaacatttattttgctaagcaaggctattttaaaaacaactatcaataattatcttattttaaaaaatacattttaaccttatatatacatgtttggaataaaaacagtccttcctgagaaggaagagttggcagacctacatcaataaaataaatatattcaaatgctttggatatggaagtattacaagagaaacattttcaagtattacttcgtatgtagttgtttcttatttctcagttcggggatctgtattcaacagggacatggaatatggagcctgagatggtatttttctgtttcatgttggtaaatagagaccactcagcaattttgctctattaggaaagtttgagacaaatggagagaagccaaggaacaatagcagtcatgcctccaactgcttctttccttctccaaccaagccagaaagaatgtangccaagtgttgagggctaaaagccagtcgtggagccgtccaggatttatctangaagggtgacatctgccactgctccagcagagcgggggcatggcatgcttctg

SEQ ID NO: 57767 - DNA, 786 bp, Homo Sapiens
ttttttttttttttttttaagaaatattcgctttattcgcctttaaatatgaaactttttgcacttaagttaaaatctctgctaaatccataggtctctcaagaactgacagatacattcatatacctactaaactactttaaaaagaagacacttccatggcgaattgaattagcccaaactttccccccaaatgggacaaggtattacattttggagtttttcttcgagtcacaaactaaactccagatctctctgtccaaaatttcatcgcttaaagaaaaaaagttctaattacaggagcggatactgagctgaagaacttcccaatttgagttggttattcctactaaacgcagccacacagctgcaacaacagctgcagcaggaggacaacgggctacgttttttgcgcaaaccctcttgaatcgggcaagttgacgttagaaactaaaatagtcccggagtcagctctgcaggggtcgggtttcgcggacccggcagtcgcccaagctcaaggcgccagtgagcgaagcacatttccagagttccaagtttgggcacaggagcgaagttcgggtctgggccactccaagccatggcctcggatcccagaaccggggacctggctggcacacctgcccaggtgcgctaccggcgccaggagccccgccgccctccagctgcccccgcggagacgggtccccgggatgggtctcacgcgcccgaacgcgagcgcactcacccggcacagctacgagaatccgagcactctccgagccctcg

SEQ ID NO: 57768 - DNA, 641 bp, Homo Sapiens
tacttatttatttttatttatttatttttgagacggagtcttgctctgtcgcccagggtggagtgcagtggcgcgatctcaacctccacctccagggttcaagcaattctctgcctcagcctctggagtagctgggattacaggcacccaccaccatgcccagctaatttttgtatttttagtagagacggggtttcaccaccttgtgcaggctggtcttgaactcctgacttcgtgatccacctgcctcggcctcccaaagtgctggaattacaggcgtgagccaccgcacccagctcgagtctttatttttgagggattaagtgaaagatccttggtgtcaaggagtgtctgttgtacgaactggaaagtagagagacttacagaacaggcttctacaaaatatgaggatttcagatgcatgagaaagtggatgaagggcagttaggagactgagtttacagatctaaaggagcataaccttttttttaagtcaggcgaggtgagcgctggtggcaatgaatctggttttattttgtgttttagctcagaatcattgtgggccggcacagctacgagaatccgaccacctcttccggcccctcgctgccgtatcacaccaccctgctaccagagagccg

SEQ ID NO: 57769 - DNA, 518 bp, Homo Sapiens
tttgtctttgctttatttatttgtagttgggggctaacgttttctcttttctttctattgatcctgttgtggttgggtttcctgtggagagagtagtttgtcctgttgcactagaacattatttactcactaaattgagtttttcagtcaattaacaaatatttattaagttcctactatgtaccaggcatagtagggctacaatggtaagcaagacagagtccctgcccccaaagagcttatattctaatggggatattaagggatgaatagaataccaatgtgtgcactgtacaggaatcatactatttaaaaataatttgtataaactataatgcttagcacagatggcgagttatctgtgctatgtgaaagctgtgaaatagtgctctaagagttgtcaagagctgtggttttacatcttttcctcattgcaaatttagtgactttctacacactatatggaaataaatgactagcaaataaaacagtcataaatacaaagcagaggttgcact

SEQ ID NO: 57770 - DNA, 508 bp, Homo Sapiens
tttttacatcatataacaaagtacaattcaatttatttagggataaagccactataactaaaccagggttcactcaaattgctaccaggcgacaccaagaaaatcccaactatagaaaaaatcaccaagaaaaacacatggacacaagaacatcactaaaagctcaagcataaggtaagaccaacaattgtggaaaaaaaccctatgtccacaatctgggcaatgtttacaagttttcccactttgttctcatcaaccttccctagtacaaatttaattacatcatcttactgaacactactgactttactgaatctattccttgatttgatgttacctttcatacaaatcacagtagaaaaacgtatgaatttttttcaatacagccaagatgctggcttctcacctgtgaatatagttttcacgattggtaggtagatcataatttataaccaaagacacttgttgcacatcaatcccgcgagccaacaagtcagtagtgatcagc

SEQ ID NO: 57771 - DNA, 715 bp, Homo Sapiens
tttttttttttttttcttcctctcactttcagatttaagattgtgttctggaacattatagttgcgcctcaattacagaaaagtaagaacctctgctgaaaatacctggtcttagtccctaaaaaagtaaaattattagacagctttttgggatttgaggtttcaaaagacaggaacctgctaagaaggctcagtcagactcaattagcccaaaagctgagcccagtaggcattgtcatatgcttttctttcataattgggggtgggaagcgaggggagggaggatttatagtttaatgccacaactttttaaaacagtgatttttgccatactatttgactaggaaaatgatcgttgctcactctataaatacttgaaatcttttctaggacttagaagtttgtagttaattgcaaaggagcaaaacaaacggaatattacacaagaatttaaaaggagaactctgcagaacatgtcttatttttattcgcccaagtcaaccaccaggaaacttggaccaggcacacggatacccatcatttcacaccggcgtttataaaaggactaatgagccctggagtttggttatttttttgatcacattttgaaaggccaggctcctccttcactgcccccgccaaaaggcaataagcaaggaaaaggtttcacatgctagcaagagcggctctaaaatttcaatttctgaggaagatg

SEQ ID NO: 57772 - DNA, 482 bp, Homo Sapiens
  misc_feature (6)..(6): n is a, c, g, or t
  misc_feature (12)..(12): n is a, c, g, or t
  misc_feature (20)..(20): n is a, c, g, or t
  misc_feature (37)..(37): n is a, c, g, or t
  misc_feature (39)..(40): n is a, c, g, or t
  misc_feature (76)..(77): n is a, c, g, or t
  misc_feature (90)..(90): n is a, c, g, or t
  misc_feature (100)..(101): n is a, c, g, or t
tttttntttttnttgtatanttcagaagttgtgccancnnagtcacctacatatcaattgttagaccatcttcatnncaccctgaaaatnaaatgtcatnnatctttagctctcacttcccagtgtatcccattttccccagccgtaggcagctttctgtttctgtagatttgcctgtcctggacatttgatataaatggagttgctgtatcatgttcgacttctctcacctagcatgatgttttcaagacacatccatgctgtagcatgcgtcagtgcttcattccttttaatggccaaatattccattgcatgggtatgccatgatttgtttattcagcaatttattcaacatttgggtgtttttttggctactatgaacaatactactgtgaacaatctgtgtacaagtttgcatgtgaacactttcagttctcttgggtgtatatgtagaagtgagatttctgagtaaatggtaactt

SEQ ID NO: 57773 - DNA, 1035 bp, Homo Sapiens
gtcacaaggttgattgattagttggggtgaggcaggaacaaatcacaaaggtggaatgtcatcttttgtggttcttcagttgctccaggccatctgggtgtatatgtgcaggtcacaggcttagcttgggctcagaggcctgacaatttataaaatacttcattcaacaatagcagaccacacattcttctcaagttcacatggaacatttgccatgacagatcacattctgggccataaaatacaccttagcaccttttcaaagaatagaaatcataccaagtactctttcagaccacagtagaattaaactagaaataaataaataacaaagttaactggaaaatcccaaaatatttggagattaaacaaaacactactaaataacacatgaaccaaagaagtctcaagaggcataaaaatattttaagctaaacaaaaaatataacttatcaaatcttgtgggatgcaggaaaagcagtgcttagagggaaatttatagtattgactacatagattagaaaagaagaaagatccaaaatctacaagcttcaacattaggaaacgtaacaaaaaattaataatcaacattagaacagaaattaatgaaattgaaaacaggaaatcagagaaaattttaaacatcaaaagctggttctttgaaaaaaaaaatcaataaaatcaataaaactttagccaggctaaacaagaggaaaagaaaagagacacaaattccaaacatcagaaataaaggaggggcatcactactggtaacatggctaataaaaagattaaaaggaatatcatgaacagccctacacccataaacttggtaacttagataacattggccagtttcttgaaaaacgctatctaccaaaactcaaacaaggagaaatataatctgggtgggcctacatcaattaaaagaaatggaatccataattaatactcttccaaaacggaaagcacaagactcagatgttttcactggtgaattctaccaaacatttaaggaaaaaaaaaaaaaaaaaa

SEQ ID NO: 57774 - DNA, 508 bp, Homo Sapiens
tttttttccatttttttctgataatttctgggcacattatgggtattgttgtatttagctttacaacttcaactgaacaacttattctagacatctttatagacagtattcttttaatgtacaatgaattatttaatcctgttattattgggtatttaggtggttcccattttcacatttaagacattgttgcagggaatatccttatccatccaccctttataattaaccagttatttctgaagaataaattgacatcaaaagtataagacttgcatcaaattgtatctccctccacaccatcttgaaaatacccactttataaatctttttttcttttaactttcaacctgatcagccagatatatttgtggtgatttccccctaaatgactaggaaagttcagcatcttcatgttactggacatttaaaaaaatcaactttattggtccaattttctaagtcaggtctcctggaagcagcatttcaaattaggattcttgtgtaa

SEQ ID NO: 57775 - DNA, 739 bp, Homo Sapiens
  misc_feature (24)..(24): n is a, c, g, or t
  misc_feature (627)..(627): n is a, c, g, or t
ttttttttttttttttttcattanataaaataatgttattatttcaccattatcatcgtttcttacatttagatccatacaggatttcttacgtttttcttttacgttgttggggtattaccaagaaaactgaaaactgcggtagattactcactttgtttgaatctctctcttcagtacaatctacaccttgatctaccatcgccggaaaattgtctctatagaagttagtttcagaatcattcatccataaatctttttcttcagactccagcaaatgcttctagttccgattttcttacattgtactttaatgtcattttagtgcttatttcatatgcagttgctttttggaaaccattttctcctaaaactttatgcaatattttaaatccttttggattctttaaaacgttttctaattgtaataactggacagctcaaatacaaaattaactctattttctgccaaagaccacgatttgctctttgaatgctgcctattatttcacttaactcttttaacgcatctcatgtgttaacctgtctacaataagtcaaattgctttaacagcactcatggggttaccatcattgtatctgagggtagccacaggtcaaattcanaatgcttcaagatgttccatctttagacaccgccagaaacaaacaaacaacccagtatgtcatctttgaaatgatccaacgaatcgaatgccgttgctctaagtacagtgga

SEQ ID NO: 57776 - DNA, 1701 bp, Homo Sapiens
tgtccagtctggtctcgaactcctgacctcaagtgctccacctgcctcagccttccaaagtgctgggattacaggcgtgagccactgcacccggctagaactcactttctccaaatccctctgcttcgaatttcaccgtcttcagctctttctagttctgggcctcaccagcctctcattctgcctgttttcaaaccttacgatccccaaaaattgtctggttctgggcctctaactccctctggctctatagtctatgactaccagattcttttggttctagaattcactaacttcctctggttctagacctcttcctataaattaatccctcttgttttagatctcacaccctccaacgccctctggttccagatcttatattcagtgatttcctctggttctggaccccacaactccaagcttcctattggttccagttctcctgatcggtaatacatttggttccaaatccagacctcttaatctctctcttttttttttttttttttttgagacagagtcccactctgtcacccaggctggagtacagtggctcaatctcggctcactgcagcctccacctcctgggttcaagcaattcttgggcctcagcctcccaaatagctgggattacaggcatgtgccgccacgcccagctaagttttatatttttagtagagacagtgtttcaccatgttggccaggctggtcttgaactcccgacctcaactgatccacccgcctcagcctcccaaagtgctgaaattacaggagtgagcctggccagacttcttaatttctaaatcacttttgttttagaccttatgaggctcagcttattcttctgcagttctctataaccaagactcattttctctcatcaaaaacaagtacagagagtttgatgtgtttatctcttttttcttcctcttcttttttttttttttcttttttgagatggagtctctctctgttgcccaggctggagtataatggtgccatctaggctcactgcaacctccgcctcctgattcaagtgattctcctgcctcagcctcctaaattggtgggattacaggagcccaccaccacatccggctacctttgtgtatttttttagtagagacggggttttgccaagttggaggggctggtcttgaactcttgacctcagatgatccacccgcctcagcctcccaaagtgctgggattacaggcataagccaccgtgcccgaccctgtccttatcttataataaccagttcttctagaaccagacgatgctctagttctcctagattctgaacctcatgacctgtaccactcactagttccagactacacaacttctagaaggtgccacctccagggtcctgattcaagatctggtgatctgctgtttctctggttctagaactgacttacaagtgccttctgattctagacctcattccgtaagttcccttggctctagacttcatcatttccagctcctcctcactcaagatctgactccaaattaccctgggtctagaattcagccttcaaatatcttctgattttagactttgccttatacatttctctggttttagaccttaccaccctcaactccttctgattctagatcttatggttcccaaatctctctggttctagaactcagattttaggcttttgtttttccttttttttgtt

SEQ ID NO: 57777 - DNA, 569 bp, Homo Sapiens
tttttttttttttttttaaaagtgtgtgtacattttttattgtgtttctccccagctaccttccctctccccgccacacacatcctatttgcagagtgttgggggaggtggaactgtgatgtgggccctgctgtctagcagtctgcagtcacacacagccatccaaactacgagattgtatatgattcagtgccaaactgtgagctttggggaatccagaaagaaggatgaagcctttcccaagtttcctttagttaaatgtgccacttgaatcctgttctgactcctaggcacatgcaagagtcaatcacatatgttcctgtggcctttatcattttggtccatctcttgagcccacatgaatactgtcatggatggaggaggaaggaccaggctgggtcagggcctgaatgcaggttttgtttggactataggggctaagttcactttaataggctgtgacctattaaaggaggcaggaaccaagtttgcacagaaggaccatcctagttgagttaaaggagttggggagttgattgtgaggggtttcctagattgccctcgtgccg

SEQ ID NO: 57778 - DNA, 1948 bp, Homo Sapiens
gtagttttttgaccccttccctaatgtctagactgtgagctcaacaatgacagtctttttcatctttgtgcccctgtgactagcagatactaggtactgttgtatgtttgctgaatgaatgagcacacagattctgaacaacacagattccaagtatgtggaatcagcagggtcatcctggcatcagaaatcagttctctctctttttttttttgacacagagtctcgctctgtcactcaggctggagtgcagtggcgcaatctcggatcactgcaacctccgcctcccgggttcaagtgattcttctgcctcagcctcccgagtagctgggattatagacgtgcgccacatgcctgggcaacatggtgaaaccctgtctctactaaaaatacagaaattagctgggtgtggtggctcacacctgtactcccagctactcggaaggctgaagtgggaggatggcttgagctcaggaggcagaggttgcagtgagctgagagggcgccattgcgctccaggctgggtgacagcgagattgtgccttaaaaaaaaaaaaaaaaaaaaaaaaaaaagaggagggggaaagacaaaattgtattctataggtcttgagttcaacatttggaaggtagacatttggaatgctctagttccactagacctttggttttcacttaagggggaatcaaggaccattgtgttagaatccagtgaggtcaggacgtagggacgctcaggacagatggctgaggatgtgttgaaagataggggtgggttacagaagattgcactctatcacaagacgaggaatgtttcggatgtggcggtgctcaagtggtggtcctgggatggaatatgccaaaccgcctattagcagagttacagtgtcttttagagaaagccaaacatattacctgtggaagtggtaagaaacaagagtaacccacttatgcctactgtttaattattggaacgctaagcctgtgggagttattgatcccctactgctcaaggtcatcgccaaggtctgatttttcacacaaaaaaatttgcaacctctggcataaatgggttaaggacagactggattccttagcatagtggagaggctgagccacccaggagtcgggaggcagttttacactcaggtgcttactgatcatgtctttacatgttttctgcccgtactgatcatgcatggtttgcacctcccctatgatacatacctgcttcaatcttgtgtagatttggagtctcatcttcctgctgggctctaaaagctccaggctatcaagagtttgaatacaatctttctggtcagtggtttcctgatggtgaggatgtttgattagttcatctacaggatttgatcttagcttgaagactattgatgctgatggttcccagggcagttgtttgaaggctgcaggacagaggtccagcaatgccaaagaggggcggtcatcatgacaaactacactactgaactaattgaaactggattcaggagacctcatctaatgtgtagaattctcattgattacaacttttatcagatatctttcatgactagaatacaatttaagctaattattttcctgtttaaacctaggcctgtgatacttgggctgtgatcctctagagccagcttggactcacatcattctatggggttgaagacaactcattccctctgaggagccttgtacatacaagccttttatttataacttattttgtattgaaacttttaaacaatactgaagaaaaaaaaacttttccgacatctgttcttggtcttttgtgacacaggttgaagggggaggaatagaaaaagacaaactgccttggaggagataaaccaattttatgtctatcatgttatacaaaaatctagaaataatagatttgtacagaaaaaaatgataataaatgagagcacaaaac

SEQ ID NO: 57779 - DNA, 731 bp, Homo Sapiens
  misc_feature (614)..(614): n is a, c, g, or t
  misc_feature (631)..(631): n is a, c, g, or t
ttttttttttttttttttaaataattgatacccttggttttaatgccacgtcctcttcaacagttgttggttgaaatgacacgtgattccaggtaagcttttccagataaattgccctggaacttcagactttgtcaggtgaatcgatgtggaatttcagaatgggctggaatgtctgagatgggcatgtccgatattcagctcagtgtggggaaactggtggccagggctggttgcaagctgagttgtaggggtgacagttcaccaacagcgtataagcaagcgttcccttctttgcattctcgccaagaggtcaacgtttttctgcaggccactgcgtgctgactctctcaccaagcaggagcgggcccctccctcacgcggagccgctggcacggacagccccgggaaggtcaggctgagcgtcctttcctctgtgcacccccggagggtgctcccattggctttctcagatagcaccatctcagggtccagctggccatggcctggattaagtttaaaatgctgggccagtccccacttccctatatatgactttttacaagtctgacacttgaagcttttgggcctcagggagcagcttgataagtcanagagcgcctgcctctcnctctgatcttcttccacactgacttctgaatcatcatcagaatctggcagatgaccgtcggccaaatcatccctttttatgaactcagctttagctttat

SEQ ID NO: 57780 - DNA, 399 bp, Homo Sapiens
ttcattaaaagtaaatttattgtttgtttaaaaaaaacaacaactgtgcaatatgtgctgttcaagacatgttttgaatcgctttgttgttcatctcttctcgggcttcagtttggcaaggctaaatgagagacacggtacagacacacagttagtacaggtgaggaaagcaacaagaatctgtgtttgttcttttctcaaatgcctaagatgtataatccaaactacgacattcagtttttaaaacctgattatgttcattgtgttctgaaaatgatcatattctaaaaaggaaaagagagcaataaatctgatttcagccaaacaaggttacaaactaaattatctatttcctcttcaaaactgaataaaacaatgcttcggggacccaggtaatca

SEQ ID NO: 57781 - DNA, 1366 bp, Homo Sapiens
ttccaaaatgattccattccattctagaaatttgaagtatgtaacctgaaatccttaataaaatttggatttaattttataaaatgtactggtgatattttgggtgtttttttttaaatgaatgtatatactttttttttgaagagtggagagtagtgatgtctagagggagctattttgtgctgaggccactatgttctgtaaatatataattttaagagcaacctcacaatccctgctaagtggagtttattatttgaagactaaaatggaattccatagttcctgataggttatattctgagttattattctgagttatctacaaacatttttgagatttgtctttacactctgattgtagtttccagcagcccacgcacactgccaagtaagtctcattttttcctgttagaaatggtgaaatatcatataatcacttataaagaaaactgatatgaaaaaattttagagttgtttgctttatggtcactcaagtagggtaagtgttccacaaattccacaagttgatagtttaacatggatgtctgaaagccacatatataatttcttaggattcttaaattagtaaatctagcttactgaagcagtattagcatcactattttagattgcaaaaataccttaattgtgtggaactggcttgtagagtggtacttaagaaaaatgggattctacctctatttctgttttagcacacttaatcaggaaaggatatattaactttcataaaaatatttttgttgtgtgaataggttaatgatatggtaaggcccctaaaataactgaattaattgtttattgtaattgtaggccattcccattattaaaaataaagacaaaacttgaagtaactgaaaatcttatcgtgctatgtagaaatattgaactaatattcaaatatttgaatgctttggtttcagggattggtttaaaattggagtccttttttatgggttagtctcacaaaaatttaagcctttatatttttgactttaaatcaaaacaaatgttattttaaatgtacagaatagattggtagtgcagaagagtgtaagttcttcataggagctttagaaaagagaaatatgtgctaattcagtttttttttaatctgcactgtacatatatacttggtaattatgagcttgattttgtttttggaaatatgtgttcataatttaggtaatttgctacttaaagcactaagtctctgatacctgaaaagtacatgtaaatggtgatggtgaaataatactgcagttaacttaatagatgtatactggtgatttttgtatgctggattaaaactccagatattaaaatataacctggataaaaagcc

SEQ ID NO: 57782 - DNA, 496 bp, Homo Sapiens
ttttttttttttttttttaactggtttctcttaaagcaaagactgtaagtactactttttctggagttcaatagttcagggagacaagtttttctttttaaaattcattctttattgtcactgttgcaaaattatcagtgagagttagcaatcgagttcttcctggacagctaaactgccctcttagtcagttaagatgtagcctggagatggaagcctagaactcagttcttttttttgttcactgcagtagccctggttgaagtaatgcaacctctcttgtcaacggccttcactgttgcattcagctgtgaattttttaaggctttgttacctatgctgacataaagagctaatattattttctctgtacctactggcctaacatggtaaagaaacacgcttaaaacattcttcttcaaagaaattattggcttggaaatatataattagaaaaaaacatatttgattgcctcctcaaaatgcccctcgtgcc

SEQ ID NO: 57783 - DNA, 1957 bp, Homo Sapiens
gtagtccggccgtggttgggggagccgcggctcatgcgcggtgcacagaggcttgtttcacatctgtaacaacaggaggaggcccagcctcgtgatgaggaatagcaaggagagaattcagctccagttcaaaagcctacaaaatctgagactgtcattgcttttataaggattccagctttccctcctggccagaaatgttcagcctggactcattcagaaaagatcgggcccagcacaggcagcgtcagtgcaaacttcccccaccccgccttccacccatgtgtgtcaaccctaccccaggagggaccatctctcgaggctgaacgttaacatttccaacatggcagcttctagggacctattaaaagagttcccacagcccaaaaatcttctcaacagtgtgattggaagagccctcggcatctcacatgcaaaagacaaactagtctacgtgcacacaaatggaccgaagaaaaagaaagtcacactgcacataaaatggcccaagagcgtggaggtagaaggctatggcagcaagaagatcgatgctgagcggcaggctgcagctgcagcctgccagctgttcaagggttggggtctgctaggtccccggaatgagttgtttgacgcagccaaataccgagtgctagctgatcgctttggctcccctgccgacagctggtggcgtccggaacccaccatgccccctacttcctggcggcagctgaatccagagagtattcgaccagggggacctgggggcctatcccgctctttaggccgggaagaagaggaggacgaggaggaagagctagaagaagggaccatagatgttaccgacttcttgtccatgacccagcaggattcccacgctccactcagggactcaagggggagttcctttgagatgacagatgacgacagtgccattggggctctgacccagtttccacttcccaagaaccttctggccaaggtgattcagattgcaacgtcatcctccacagctaaggtgagttgggtctcctagaagtttgtgtgggggccgtttacttggtcatgtctggtgttccctaaaggcaggtttagagagggctgagggggtgtgttcctccagcccaaacctaggccaggtggaggaactcctgcttgggaggaaaagcagcaggtgtgatggaatggaggtcaagcctcagcagcacagggagtgggcttgggggccgcaagagcagaagacccatacctcttctgggcggtggattgtcagtggggaagggttagaggtgtgggtcttggtgaggtatgaatttctctcttgctgccaggcgaaggggctttggtcatgaaatgcctaaccttgtttttactttaactcgttgctttgaattttgtcctgcttgtctctttaatcacctagccttgcttctcatgtaaaataagactctctctagctaagaaagccgtacaaaccccaattgaccccttaatttacaagacactaagggctcctcacccaaccccctttcgtaaggagttggcctgggtaaacagatcctcagcatttcaaaggagcctaattaactgataaggtacgaacaccaacaatatatgaagttcccaggaattttctccaagagataacaacataaaaccttgagttcgtgtctggcgtagaccctatatctaattataatgaaagatttagaatcttgcacctggtactgttgctcttcttgtaaccatttgtcttttaagttgtttatcactctgtaaccattttgattcttttgattcttgcatgtttttacttctgtagaattattacatttaagtccccctccccttcctaaacctaagtataaaagttaatcgagccccttcctcgtggccgaaagaattttgagcattagctgtctctttggccgccggcttaataaaggactcttaattcgtc

SEQ ID NO: 57784 - DNA, 548 bp, Homo Sapiens
tttttcctgctcatttaattatttttatttacacaactttttccatcatcatgatgcaaataagattataaatacacaaacactggagtacatgcaacacattccacaaaggaacaaaaatgtacagcactacagaatagagaacccaaatttttatatacaaagtgctttaaaaaaaaagaccttgtgacatattcaaaccatatttatttgaatactttccaataattaccatgggatacatcatttataaataatatttaatctcccctattttttcaagccagaatttgtgtttcaactaatcaagtgaacagccattccattatgtaatattaaaggcaagtcacatagcatcaaaatgaaaccggtgggcttcttgtcgtttttctctatcatctgctttcttttcctgccaatgtaaaatgccaattattgccaagatgaaaacacagacaccgatgagagctatagcagtaagcagaaccatattaccttggtgtaagatacaggttggcactccacctccgagggacattgtgaggggg

SEQ ID NO: 57785 - DNA, 1390 bp, Homo Sapiens; identical to SEQ ID NO: 24593

SEQ ID NO: 57786 - DNA, 560 bp, Homo Sapiens
  misc_feature (367)..(367): n is a, c, g, or t
  misc_feature (403)..(403): n is a, c, g, or t
  misc_feature (422)..(422): n is a, c, g, or t
  misc_feature (448)..(448): n is a, c, g, or t
  misc_feature (472)..(472): n is a, c, g, or t
  misc_feature (513)..(513): n is a, c, g, or t
  misc_feature (525)..(525): n is a, c, g, or t
  misc_feature (533)..(533): n is a, c, g, or t
  misc_feature (538)..(538): n is a, c, g, or t
  misc_feature (550)..(550): n is a, c, g, or t
aaagttcatagagagtttattagccataagagctgtttatttccatactcatgaatcttaaactgcaattctctctctattcaacccaatcctggtagaatcatgtttttcttcctgaaggacttgtatgtactggaccagtaagaacctttgcctgttgtctgtagagaatagtcgatgatgtttcatgttcctgaagatgaaaatgttcatcatttttaggaattatagttaaatctggcaagtgcttcttgcttttttctttttcttgtacctaaacattttttgaatcataccaaattctcagtttctttgtttcaataagcaaaaatggaaacaaaataacttaaaataccactttgcaggntttgttaagtaatccttcataaattgcaagccttcngaggggagggcccttcccnaatttggtcccagcacctaacatagngtgggtggccccattgcaggagcnccattaatccttggccgaataaaattaataagccatggacnccgggaagaccncagagccnggacnaagtgggaagcngaccaaatat

SEQ ID NO: 57787 - DNA, 726 bp, Homo Sapiens
  misc_feature (596)..(596): n is a, c, g, or t
  misc_feature (688)..(688): n is a, c, g, or t
ttttttttttttttttttattttgcactttgttttatttctttcaaggaacttcacaagagcagtcctgtatctgcttttcttaccattgaacctacagtgcccagcacatagtaggcactcgacacatacttgttaaaggaatgaacagatgagtgaccaaactggaaacaaccatcaaatacaaggataatacaaaaatccatgattcctgtcccgagatttctttcttttttaaccttttgtctgttgagattcatttatgtgcagtgaagtgcacccttattagtataaagttctgtgaattatgagaaatgcatacagtcatgtgggcactaacacaatcaagataaagaacaacaacaaaaaatttcctcctgtgctttgaaagtcaacacctcccccaccttttgctcctggcaacactaatatgttttctgttcctgtggtttcaccttatctctaatgtcacagaaggtaggctttaagtctggtctctttcacttagtgtaatgcatttgagattgatccaagttattgcatgtattaatagtccactccttttcaatgatggtcaggattctgttgtgtggatgntatataacacagagcttatttagcaattcactcaatgaagatcagttgggctatttccagggtatttcggctattatgagtaaagcacatantaaaatttgtacacacagtcttagaggacataagtttc

SEQ ID NO: 57788 - DNA, 460 bp, Homo Sapiens
ctggcttaatttcttttaaagcatctttgatcattaagttgaaatatgaatgtttagtctgaaaatagcagatttttaaaagtactatttggacatagaattaattatttcttatcccatctccttttcttccttctgtgatttgcttagattgccaccaaggagccaatgaatcccattaaacaatatgtaaaggatggaaagctacgctatgtggcgaatatcttcccttacaagggttatatatggaattatggtaccctccctcaggtaacatttttgttacaatggtaaaatgttcctgtcttctgaaaaaattgccttataaatcctgtgaactactgaatttaaattggttctgaggacatgtcatttggagaggtttgtaaatttggaatttattaacgtggatggagttttagtatatcaataaattttgttttaaaccataaaaaaaaaa

SEQ ID NO: 57789 - DNA, 505 bp, Homo Sapiens
ttttttttttttttttttaagtttagaactttaatcaacttcagagaacagagattatgcatgttacatgaccaaacgtagagcataaagaaacaccaagagcagctatcatttaggtaagaggtttcaaaattcacttagtgactagctagttaacttcatccaaacagatagggaaagtgattttcttttttttaattggcttgagttgtcctgaaaatcgcttctgcaaggaaagagtccaggaaaaaactggcaattctttttttcttaatctaataccaaatttacagatttctggcccttattttacttagcgtttgttcctttcagtttactctttgtgatctgcataggataaatgaaaatgaaccatataatcaaactccatcattacttgtgtacattcaataaataaaaatttctatatgcatgcaggattgtcactggcacatgaattagaatcccacctccctttcatcctgaaccccatccccctcgtgcc

SEQ ID NO: 57790 - DNA, 495 bp, Homo Sapiens
  misc_feature (370)..(370): n is a, c, g, or t
  misc_feature (389)..(389): n is a, c, g, or t
gagcctgctgtgccatgtcagtcaaatctgggctgtcttcatgattcaacttggtgatgtgatgcaaccttgggcctgggttgaatggacagactgacattagaatctacactgagcacaccttaaaggggtgtgtgtgtgtttaatgtagatgtacgtataaggctcatttctgactttgattactgacatgagcagttgattagccgtagtaaatattaaattcatagtctggatataatttttaaaaaatagcaagacatcacccccccccaaaaaaaaacttaacagtcaatgtctttcctgaataaaattaataaaatttgaaacaataaataataaaaataggaagtagcaaactacacagaanaaaaaaaaaaaaaaaaaanaaaaactcgagggggggcccggtacccaattcgccctatagtgagtcgtattacaattcactggccgtcgttttacaacgtcgggactggaaaaaccctggcgttc

SEQ ID NO: 57791 - DNA, 4843 bp, Homo Sapiens
tacggctgcgagaagacgacagaagggggggatttcagggagaagaagctgctttccctcctctctactctgtttcctgcatgacttcagctattggctggtcctgggaaagaaagtgggaaaagctttttcctctgtattcttttgggctggatagtttttgagaacttgaatctgtcttgggctgtgagacaagccactgggttcttcaaaggataaactacctacatagaggacatacctttggttaaaggagctgccgtcaggtgggaatgagatctcgaaaccaaggtggtgaaagtgcatctgatgggcatatctcctgtcccaagccctccatcatcggcaatgctggtgaaaaaagtctctcagaagatgcaaaaaagaagaggaaatcaaataggaaggaggatgatgtcatggcctcaggaactgtcaaacgacacctaaaaacatctggagaatgtgaacgaaaaactaagaaatccctggagttatccaaagaagacctcatccaactactcagtataatggaaggggagttgcaggccagagaagatgtgatccacatgctgaagacagagaaaaccaagcctgaggttctggaggctcattacgggtctgcggagccagagaaagtgctgcgggtcctgcaccgagatgccattcttgcccaggagaaatccataggagaagatgtctatgagaaaccgatttcagagctggacagacttgaggaaaaacagaaagaaacctaccggcgcatgctagagcagctgttgctggccgagaagtgtcataggcgcaccgtatacgagttagagaacgagaagcataaacacactgactacatgaacaagagcgacgacttcaccaacctgctggagcaggagcgggagaggttaaaaaagctccttgaacaagaaaaggcttatcaagcccgcaaagaaaaggaaaatgctaaacgactcaataaactaagagatgagcttgttaaactcaaatcctttgcactcatgctggtggatgaaagacaaatgcacattgaacaacttggcctgcaaagccagaaagtacaggatcttactcagaagctgagggaagaagaagagaagctcaaagccattacttccaaatccaaagaagacagacagaaattgctcaagttagaagtggactttgaacacaaggcttcgaggttttctcaagagcatgaagagatgaacgctaaactggctaatcaagagtctcacaataggcaacttagactcaagctggttggcttaacccaaagaatcgaggagctagaagagatcaacaaaaatctgcagaaggcagaggaagaacttcaagaattaagagataaaattgccaaaggagaatgtggaaactctagcctcatggcagaagtggaaaatcttcgaaagcgtgtgcttgaaatggaaggtaaagatgaggagatcactaaaactgaatcccagtgtagggaattgaggaagaagctgcaagaggaagaacaccatagtaaggagctcagacttgaagttgagaagctacagaagagaatgtctgaactagagaaattggaagaagcatttagcaagagtaaatctgagtgcacccagctacatttaaatctggagaaagaaaagaacttaaccaaagacctgctaaatgaattggaggtggtcaagagtcgagttaaagaattggaatgttctgaaagtagattggaaaaggctgaattaagcctaaaagatgatcttaccaagttgaagtcatttaccgtgatgctggttgatgaaaggaaaaatatgatggaaaaaataaaacaagaagagagaaaagtggatggactcaataaaaattttaaggtggaacaaggaaaagttatggatgtaactgaaaaactaattgaagaaagtaagaaacttttaaaactaaaatctgaaatggaggaaaaagtatacaacttgacaagagaaagagatgagttgataggcaaattgaaaagtgaagaagaaaaatcctctgaattaagctgcagtgttgacttactaaagaagagacttgatggtatagaggaagtggaaagagaaataacaagaggaaggtcacgaaaagggtctgagctcacctgcccggaagataataagattaaggaactaacacttgaaattgagagactgaagaaacgtctccaacaattggaagtggtcgaaggggatttgatgaagacagaagatgagtatgatcagctggaacagaaatttagaactgagcaggataaggctaacttcctctctcaacaactagaggagatcaagcaccaaattgccaagaataaagcaatagagaagggtgaggttgtgagccaggaagctgaactgagacacagatttcggttggaagaagctaaaagtcgagacttaaaagccgaagtacaagctcttaaagagaagattcacgaattaatgaacaaagaagatcagctttctcagctccaggtagattattctgtacttcaacaaagatttatggaagaagaaaataagaacaaaaacatggggcaggaggttctcaatctgaccaaagagttggagctttccaagcgctacagcagagctcttaggcccagtgtgaatggaagaagaatggtggatgttcctgtgacgtcaactggagtccaaactgatgcagtcagcggtgaagcagcagaggaagaaacgccagctgtattcatacggaaatccttccaggaagaaaatcatattatgagtaatcttcggcaggtgggattgaagaaacccgtggaaagatcttctgttctagacaggtatcctccagcagcaaatgagctcactatgagaaagtcttggattccatggatgagaaagagggaaaacggcccctccatcactcaggagaaagggccccgaacaaattccagtccagggcacccaggagaggtagtcctttcaccaaagcagggccagcccctgcatattcgagtgacaccagaccacgagaacagcactgcgactttggagataacaagcccgacatctgaagaatttttttctagtaccactgtcattcctaccttagggaatcagaaaccaagaataaccattattccatcaccaaacgttatgcctcaaaaacaaaaaagtggagatactactcttggcccagaacgagccatgtccccagtcacaattactacattttccagagagaagactccagaaagtggaagaggcgcatttgcagacaggcccacatcccctattcagataatgacggtgtctacatcagcagcaccagctgagattgcagtttctcccgaatcccaggaaatgcccatgggacggacaatcctcaaagtcaccccagaaaaacagactgttccaactccagtacggaaatacaactccaatgccaatatcataaccacagaggacaataaaattcacattcacttagggtctcagtttaaacggtcccctgggacttcaggtgaaggagtcagtccagttattactgtccgaccagtaaacgtgacagccgaaaagggggtttccaccggcactgtccttcgctctcccaggaatcacctctcctcacggcctggtgcaagcaaagtgacgagcactatcaccataacaccggtcacaacgtcatctgctcgaggaacccagtcagtgtcaggacaagacgggtcatcccagcggcctacacccacccgcattcctatgtcaaaagaaagcatcatcattcaccagttacgaatgaactccagatgaaatggtaaaccaagcacatactgggtgtgtgtacgacctctgaatccctattgaatggacagccctcaatcatgactaaggtcctccatgctactgatcactactggaaatattttactacttccagtgatttttttttaaggatataatgtaaaaagctgaaaatggccttgctgataatatgaaaatatgtagcaagagcaattcaatctatgtgccaaaagaaatttctttttgcaaagctttcaggtctatgggcacatgctgtataacttatattttataatacattttgtaatgtgattttttttgctaaagtgtttccctttttcatagtctctggcacatatatctatggaatacgctgtcagttcttcaaagtactggtattgttgcattcaaaatggtaatctataattattttctttttatcaatttgttaattctgaaaaaaagaaagtacaactatatttcctgaggtaaattcaagaggtaaaacttagaagcaggagactctggaagaggttttactattgcttgtacaatgctatggttctgatcatggttcaatgctaacaaataatgctctgacttaagagcttaattttaaatactaaaaatcagtttctaaagttgctctttctggtgttctgggccaaaaaccttggatgaaatgatttttatatagaacaaattcataaaaggagatgtaccagtttaaccagtaagggcaataagaacagcttcgactgacagttcaattatacttctgattgcattatttacttgtatgtataagacttataataaggactgtgaaataaagatagttctcacaatctaatccaatcaaaacttgaatataaaaacagacctaaaatgtcaggatcttttttaaaaaataagactgggcatggtgggtcgtgcctgtaatcccagcactttgggaggccaaggcgggagaatcgcttaagcccaggagttcaggatcagcctgggcaacacagtgagagtcttaagaaaaaaaaaaaaaaaaa

SEQ ID NO: 57792 - DNA, 3228 bp, Homo Sapiens
agcgggttggccagggtgatctcgatctcttgacctcatgatccgcccacctcagcctcccaaagtgctgggattacaggcatgagccaacatgcccagcctcatcctctcctttttaatggtatatgttcttatgtcagaagtgtgttttatctaaggtcacagattattatcctcttgaggttttcctctgtctctctctttcctgtagatttctttcttcagttgatgtttgcttcttctagtttctcttcttcattatggagagtttccttaagaggctgttcattcttagttaaaagcaagacatatacaggtgcatatgcacacacacacaaaacaaagcaacaatgacaatgatggcaagaaacaatgtcagaagttctgtgatcatggatagggctcgtcaactgtagggttgcactgttgcatcataggttgttcaatcaaagccggtgtgttctttgaaatgtttccccaaggtcatgattagggggtaccccactttctgcctgcgagatttgcgcctggggcatataactgactgctaatgtctggggagcatgacaaataaaaaagttgggtttcttattgcaaactctataggctttcaaataagcacctatttcgcaacctgcagcctctcctagtttgctacagtgcctagtatcatcagtttcaaatctctctagccgatttcctccaaaaaagaaagactccgcttccagtaggtaagggaagtagttagtttggatccaaaggctccatataattttaatacactttcagcccctcgctaaactcctgccttccttaattctgctgcctccaagcagtaagtctttctggattcgggagaacacattagtccactttctcttggaatttactctccgtaaccatttcctcgattatgctaaggcacttcagctattttctgatttcaaaaaatcagtagaaatctctcctttgctgatcttgtttcctttattatttgtgcctttgtgggtgggtgtgttgtgtttttattcctttactttcacttcagtgaagtatcagtaaaagagaaagaagataagcaggcatgatttcaccctctcttactggaaatccaggggaacgatagctgaggaggaaagtagcttggaagagcaccttagagtagaaaaagacgggagaaggtgagtttacaaaagtacagcaagatgatgatgatgataaataaaactcaatgcgtgctcactatgtatttgcactgtgcaaagttctttacatggattatttatttgtgtttttgtaagaacacctcaggaagtagctattgagacacagagaagtaatatgacttgtttaggttagtaaatggtagaggtggtattcaaattcagatctgatttcagagaccatcctctcaactgccacactatcttgcctcctacaaattgcttaagcagggatttaaaatgaaaccgtacttttacaaaaatcatttttcatgtccattatttaggagtctctctactctatcaaaagtattaattgacctatttattaatatcttagtaatgtaaaatgcttttaggtttgcaaattagtaagagaaacttcttcagattaatagatgctgtctttatgaggactgcatgagacttatgtactcatcattatatacacccacagacgatctatttgaattctgtactcttactcttttgttaaataaatgtactctttctaactatgttttaaatcatctgcaaagagatggaagctgtgtgtatacaacagcaaacatctggaagaaaagaatattcagccaaagcttgttaaagagattcataagcaaagtatgcctttgaattatgaaaatgaattcatgtccaacatcataaagaactctgacatgtctgtttatgtttcaaacatggcttagagatcactgagattaaaattcaattaagtgtgctctgttgtctttgctgtcaatttcagttaaaccagacttgtttggcagttttggggagaaaaatcttcagtgttttaccttgctaacattttaccatttggactttgtgttttttcccaataaatgcatgtcatttaaggagatgcttcatgttatacacacctggtgattttcatcagcagttgtacagatgaaagagaagtaaaagccaccaaataattcatcttttaggctttgtaaaattatcattttataaatttttaaattgtgaaatataacaaaatttaagaaagtatgtaaaatttaaattttaagtttaacaaattgttctaaagtaaatacctactatgatcacccctcagaaagaccctataatttcctgtttcatcctctccagataggtcaccactatcttgactttacttttacttttcctacttttctttatgatttaccacgtatgtatgcatgccaaaacaacagttcaatttagtttgttttgcattttatgtaaatggactcatcttgtagatactcctgtgttttgctccttttgtgcaatattatagttgtaaaattcatcaatgttgtatgtagctgaggattgcacatcataatatatatcatgatatatagcattctattgtataaaggaaccacaatttactgtccaatcttctttctttatgcagttgaacatatccagtttggaaatattatgaataaagatatttcgaacacttatgtgcgtgtatcttgatgcacataagcgtacatttttgtgggggaatatacctaggagtggattcatgggtcatgcatatctttaacttcagcagataagcagaaagcatttgacaaagtggttgagaaggtaatgagaattcctgttgctccacgttctaataaaaaacacttggattttctttcttttttttcaaatgacagggctctataatgggatcattgcatttccctgattactaatgagagtgagtactccttcatatgtttagtagatatttgaattgtatttgtttttgttgttgttgtagctcttcatgaaaagtactttctaaacagcatttttgagcaccctttagggagccaaaggccaaataagttagagtatttgtcacaacatggcaataagagaggcgaattcatccattaattgcttgccatatgcttatcactggaatatattttgcagcatctcctgacatcactatttatcccttttaccaaaaaaaaaaaaaaaa

SEQ ID NO: 57793 - DNA, 722 bp, Homo Sapiens
  misc_feature (687)..(687): n is a, c, g, or t
  misc_feature (710)..(710): n is a, c, g, or t
ttttttttttttttttttaagtaacagaaatttattgtctcacagttcaggaagctagaagtcctagattttggcagaattggttccttccgcgggctgtgggggaggatctgttccttgccgctcccagcttctgatggtttgctggcaatccttggtgtcccttggcctctgctgcatcaccccagtctctgccttcatcttcacatggtacttagcctatgtgcatgtctttgtgttcagatttcccctttttatatgtacaacaatcgaattagggggccaccctatgccaataagacctcatcttaattatatctgcaacaacctcattttccaaataagggcacattttgaggtactaggggctaggacttcaacatatgatttttggtggaagggacacaattcgacccataacaccatggaagcctctattctaactagtggaccacaaaggctttttaggtctcagcatttgtgctggcttagggccagtttccaagtaatccctaaaggcctgggcatttccatttccctaagcacacatgcatagttacatggcttaagatccctttggggaaaacgagaagatttatgatatagttatggtggtattgctgggtgcttcctccagagtaccctgcaccccctttttcaagggcttcagctctgagaattgtctgntaatctccattttggtgactcanaacaggcctcta

SEQ ID NO: 57794 - DNA, 428 bp, Homo Sapiens
ttttgagacagagtctcgctctgtcgcccaggctggagtgcagtgtcgtgatctgatctcggctcactgcaagctccgccttctgggttcacgccattctcctgcctcagcctcccaagtagctgggactacaggggcccgccaccacgcctggctaattttttgtatttttagtagagatggggtttcaccgtgttagccaggatggtctcgatctcctgacctcgtgatccgcccgccctggcctcccaaagtgctgggactcacatttttcacatcagtattattcacatattaggaataaacaaagcctcaccttaaaccattttttaaaagtacaaaataaatactccattttataactatatttgaattgttcattttagaagacaaaaacttcaagaaaaagtagccattttatctcacag

SEQ ID NO: 57795 - DNA, 661 bp, Homo Sapiens
cgtttcttggacactgtgctttcccgtttgtaactcaggtttgatcaggcagttggtgaagaccgtccctctatgggtgtccctagtagtgtggggacatgttccctactcagcgcatcctgtctgtgcctggagatccctaagtggggcctagtgtgggttgaatctaagtagttaacagggttgcgcatttgcaggggcagcatctttccagtgagtgatgtgttaaattcccatgtctttgtgcagtgaagcaggactaagaatggatttctggactttttggaagtttacccctttctgaattgcttctgtaagtggcagtgccatttaggatgtactgcataagtttttggctgggattttaggactgaaatacatgtaggtggccatcaaatcagggtttcattgtatcacattaaataaacatgataagttagccaggtgtagtgactactggggcctatagtcccagctgcttgggaggccaaggtgggaggatcacttgagcccgggaggttgaggctgcagtgagccatcatctcgccattgcattccagcctgggcgacagaaaaagaccctgtctcataaatagataaataagaacatgatgatttttaaaaagtcataaacccagacaaagccagagtaaaaaaaaaa

SEQ ID NO: 57796 - DNA, 569 bp, Homo Sapiens
gccagaaagcaaggaagccatccaagtccaacaggatcacgtcaaaaggccatgggagtcaacttgaagagatacttattaacctgagacaatatgagcatctaaaacaattaatagtgactacaatgggctcaaatgcaaacaataatctatgagctcattacgatattcaggaaaaaaaactattggtcactacagtggaggttactagtcactaactcattattctgaaaaatgacttaaaatgggagatagggtggagaattaggtatttatccagtttttcctgtacaaacgtaaatgtttagggagattgaagtagatgaaacaagtctggcaaaattgagataactgtttaatccgggtgttgggtacatggaggttcattatatttctttcccatatattttatatttgaaccccctccaaaaaaaaaaaaaaaaacagaaaaagcaagacagaatgtgagctaagcagcttagggtttaggcaaggcttctgcctacaagagagactaggatatgaggggtaatattagtcctgatgggccaaaccaactggagggatat

SEQ ID NO: 57797 - DNA, 418 bp, Homo Sapiens
tttttttttttttttgtggccctggacaggtgacttaccttacctgagcttcagacttctcatctgtaaaatctagcctggcacatagcgaacattccaaaaaatgtacctactgattttatcgcagaaatcagcatctcttcccagccccggtccccaggaaggacttgaaagagctgatagtcacaggcccagggctggggcacattgtgcttctgcaaggctcgccggaccacgctgggggctttgtcctgactggtcagcaagatgcttcgatacaggttcccgtggtcattgtcgatgctgacgcggatgacacgggcctccgagctctgctgcgccgggagggggattcgagggctgcccagaggcaaagcgaagggccgggggctgggcaggtccaggctcaggggcagct

SEQ ID NO: 57798 - DNA, 677 bp, Homo Sapiens
  misc_feature (46)..(46): n is a, c, g, or t
ttttttttttttttttttgctgccaccttctcttcccaccaccccntatagttcatattttatactctcagatttttctataatgacataggttgctttgataggcagaaataacttagataggtataacgctttgcccatggttaggatgggatttggattcaagaaagaatgaagactaggttaggtctaatcacagtgctggggcagttttggagagggctaataactaggaaggatgcaagactccatttgtataaaacatctcttatggaggacaggggtcagtgaggacttcggcagtggcccacctggtcagtctggactctttcagatgtgtgactggccggctttactaagggagcgtggcggtggggtaccacaagtcacagggtcttggtttgaggcaagtgtgagtgtgtgtacacgcgtgtgttttaggacagagagtagggtcaggcactcaactgctccctggggagaccagctcaccctttcctgtcccctctgagcttgtggcttcctcctggacgctgctttcctcactcttcctttctatccccagctcttgcctgactcagttcctttctcctccctgctcctcacatctcaacacaactccaagcctagggatctggcagtcacctctaggattctatgggtacagagtagcatta

SEQ ID NO: 57799 - DNA, 718 bp, Homo Sapiens
ttttttttttttttttttgagatggagtctccctctgttgcccaggctggagcacagtggcacgatctcggctcactgcaagctccacctcccgggttcacgccattctcctgcctcagcctcccgagtagctgggactacaggcgcccgccaccacgcccggctaattttttgtattttttagtagagacagggtttcaccgtcttaaccaggatggtctccatctcctgatctcgtgatcagcccgccttaaagtgtgctttaaaccagtgcagtcattgtcaggaagcccttgaacgtaggtttgtcgaatggcttccttgtgattagattcaggtaggtataacatttttggcaggactactgcatagcagacatgctgttcttctcagtgcacgacatcagcagattctccatgtcggtttgtctcatgactggcgatgttcatcttgaccatgtgctcagggcgctgttccagattaccccattgtgaaagtgccatcttctctttgtatttaattagctatgcgctgttactgcatgggcactctgtgtgaatatccagttcccccacaatatcttctttctatcttttggatgtctgcatatgatatggcttggaaccgtgtctccaccaagtcttctgtcaaactgtgacttctaatgctggaggtggggcctggtgggaggtgactggatcatggggctggatttctc

SEQ ID NO: 57800 - DNA, 3194 bp, Homo Sapiens
aagagcgtgccgggagcccgagccccagccgggccgcgcttcgccgctgcgcaccccagcggagccaagccccacgctggccggacagggccgcctgtcgccgggctgctgagaactagccctagacctctgcgtgagggttcttctgccgaagacatcaccagtgtgtggagcctgccacacccacccgctgccaaaccacggcctttacctgtgtcttccggtgtttcccgtgcgacccatcctgtgggagtgcctcgtgggctgccccagagttcaccccacactcagcagcaccaatggtgaagatgacaagatcgaagactttccaggcatatctgccctcctgccaccggacctacagctgcattcactgcagagctcacttggctaatcatgatgaactaatttccaaggtacacatttccagcaggccttccttgcctaccccggggagggcgcttagtgctcctgaagttgcagaggtttacaagctctcaagaatatttgtactccatctttgtacagggagggctgacccacgtgaccgtctcactcaactgagaaaaactctgagttggagggacagagtagtcatttaatttgttattttggaaatgaggtgtcatccttgttggaggctttgggagctggcagcttgcaagccagagaagggaggggctggggattgatgggagccttgttctcagcttgcttggtttaggttggcggacgaagagtgaagagtgctccctgctcagaaggtgaattctgataaagcaggggaatgtcttgtaagaggggttccttagcaagatgagagagccaccaggaagttgtgagactgtggaattactaaaatgggtggcttttggcagggaccaaaagtggcttgttgaagagctgaccttctggcctgtgggggccgttagggcttatacatgaggtaatatggcatgacatttgatcatgatcagaagaatggaaccctgtttttcctgaggtgcttaggcagctgctttctaaagttggggctgggggattattaataagtaaataaaccaacatgccagttgtgcagttcaggaaatggatccttcagggagcgttctcaggggaactgcttccctcctggccctagattcccaggggaagagaaacaggttttactaggctgcatgacaaagagaaagagataatgggagacttttcccttacaaaagcatctttacccagaacctggacttcacgccattaaagtaaaaaaaaaaaccaacccatctttacgcagacccagacgaagttttttgttttgtttttaaatgtgttcctcatctgtttacaagacctgctggaaaaggtggctgttgctttctttgcctctggtttggtagccccagccagagaggaatgaaggatctagtcagctcttgtagaacagtcctctccagctggctgatttgacctaggaggtgaagaaagctgcccaaacaaacacatctgtagtagtgaggcttttcaaatcgggcctgaggaccgaacctcttgttctagccttactccagggtctaaggtgaccacagagcttgaagcgtacagccccttagagtcctatcctctggccagacttgtgaatctgccccactttcctttctttatggttctgctaattcctctcctttatgctgcttatgtttcagccagcctttagcttccttctcagcttcccttcgaattttggggaaccccttgagtctggaagtttgaatgtgtggaggtgtcagtgagagaagagaggagttggtctcttggacgttggaattgggtttgcaaagttgtaggggaattgtgagttgtcctttttttttttttccccccctttggaaatctccagagaaattatttgcctgtatctactggggaagccaaggcatcatttttttaatgcaaggaagcagtgccatgtatcataagaaattgaggtaccaataaggtattttagcaccctttatgtactaaaaactgcaacttgacactttatcaatgttaacttaaccttcatatgaagtctttaaggtagttgacatgagtcatactttatgcggatgaagaagctgaaactcataaaacttgtccaagatgtcaaatcagaggttcagagaagagtgattactttgagtgggtgttcaggagggattgctggaggagatggttctttgatctgggccttgtaagatgggcagaagttgagtatgtggagatggtaatggccttcagaatttatgtcttatctgtttggcctggcatacaaggcctttgacaatttggcagagtctggcttttttggtaggtctccagccagctcttcactttgtttcagccacttggaaccaagccacatcgcctgaatatgcaggtatgggtgtttcagggctctgtgccttagccaagagtgtccgttctccttcacctccctcctcctacacctccctcctctttctcctgagctctttcttatacatccttgggcatggcctatatctgctttacatctcggggtcagaacctgacccatggcaagagctcagtaaatgataaatgaatagatggaggttgagccttggagaagacaagtaatgagaaaaaaaaatactttgttggcctcatgtccttcctgtcccttttggggcagaaaggctcattcacaagtccaggccaaagtcagcacaggcttcaatttcattggctcaggccggtacacagatggggtgcattagagcttgatgatttaaagggttgggtgaaatgcctgactgtggggagagctgagggagctgtggctggcattgcacaaagcttcctttatttcactccacagccacccccggcgttaaataatctatagattcttatgcaggtctgcctaatggaaagatcattgccccagcctcctccttggaaaataggcctttcttttcatttttccctccctcttccatttaagaaagttcaaggagagaatgtctctcctgttctcctctcttgacttaatctcctatgcagtttcagaatctgcccagtgggagttaggagctgggaagcagataactggagctggatcagcagtgtaattaaatgatactttgtactggtaatagggcctttcatctgaaagcttgacattcgtttggtgc

SEQ ID NO: 57801 - DNA, 535 bp, Homo Sapiens
tttttttttttttttttcaaatcagaaaggttctcattttttaaggacaatggaattgacctagcgtaatgcaaacatcccacacctccattaaacctctgctccgcctcacctggaaatgatggacaagactgatggaccccgggtactcaagtcagacagaaatgaacaggagattaaactgcaggattaacccccaggcaggattagctctgtgccactggggatcatcaaatacatctttgtgcagaggacaaagtagggcttaatgtatatttgaggacagtaaatgaaactctgaaaccctaattgccttcccaggcttaaggcttcctatccaagagactcttccactagggaggcctaataacaccctgtccgacttactgacccatacctgcctaggatccttgttatctggagccactgcttggttccataaatcatctactaaactgtgctgaaatatcaaaagcatcactggctagcattactccacaaaagctactgatgccccttgggcaaatcttcagca

SEQ ID NO: 57802 - DNA, 517 bp, Homo Sapiens
  misc_feature (458)..(458): n is a, c, g, or t
  misc_feature (464)..(465): n is a, c, g, or t
  misc_feature (480)..(480): n is a, c, g, or t
  misc_feature (485)..(485): n is a, c, g, or t
  misc_feature (498)..(498): n is a, c, g, or t
  misc_feature (505)..(505): n is a, c, g, or t
atttatttccactctaatctttgtttcccctattctgctagcttgggtttagttcttctttttgtaggtcctttaaagtgtatagttaggtgactgatttgagatctttcttttattttttatttttatttatttatttttttttgagatggagtctcactctgtcgtgcaggccggtatgcagtggtgcaatctcggctcactgcagcctcaacttcctggttccagtgatcctcccacctcagcctcccaagcagctggaaccacaggagggtaacaccacaaccagctgatttttgtattctaggtagaggtggggcctcactacgttccccaggctggtcttgaactcctgaactcaagtgatccacctgccttggcctcccaaagtgctgggattacccgcctgagccactgcggccagccagttgggcaagtgttttcttttttttcttttntctttnntttttttttgggaanggagnctcactttgttgnccaagcntgaatgcatggc

SEQ ID NO: 57803 - DNA, 2828 bp, Homo Sapiens
caattctacaacataattagaataagtgcagtgattttgtttatgctttgggtgtaaactgaatgcacagagatctcaaggaacctcagaaatatttgttatattcactgatatatccccattgcctagaactatgcccaacatggaatgggtgcttaataaatatttgttgagtgaatgaatgagtttaataaacattgagcatctagtatatgtcaagtcctgtggtatactctggggactagctacaatgataaatacactgtgaccacactgcatgcatagtcttttagaaagaacgtgtgtgtttggtgacactccctggcctggggagaagcaaccatgtcttgtgcacagccgattaccaccatttagaagtgttgagcacataacaaacaaagctcaatggcagcttaactgaatgaaccaatgagtcaaccagtcagtctatgttctcatttcatagtgaacttcacctccaccctctccttcccgaccttcactgtttcccaatgtggccagctcgtcctctgcatcctctctcacatgccctctcctgccgttgctgtggccaatccctggaaggggcatgcctcaccttgttcctgccctccttgcatgagtgtctcctgcctccacaccactcacagtgccacctggggtttgatcgtgtcactggcccactcaggatccttcagcagcacctcactacttactgcgtaacatcccagctccccttcctggcattcaagccactctgctgtctgaccctaacctgcttcccagcctcaccttccaccttgcaacagccaaactaaattccaccacactccacaggaggggctccgtcttttatctctgttcccttccacagaacgttttcttttcctggaacgaccttccccttcccctacttgtcaaaatcgtcctcattttttgccaccagaccacatgctattctcactctcaaatccaaagtgactgtcccagccaaaagtgatttttctttctctgccctattacagcactcagattataccattcatgtgttccctattacatgttgcttttattgtaattgtgaatcatacgagtgcctgctctattcagggactgtgctatgcacgtcacccatcctttctataattctcaaccagcctgcaagatgaataccatcatcagtggtgttcatggtctgtccaacatcgcacagctaataagaatggagcccggctctaaggctgtgtgtgtcactgcaaaccttgtgccctgcccattctagcagttgcctcactcacagttcctggttgtcttgtgcttctccatgagtatagtggtggccttgaccttatgtatcttggttccaaatgtaacatagatctacttagtgtcttcatgggctcagaacacatgacttaataataccttgtactcagtaaaggtggcatgaaggaatgcctgagatgtctctcttttcttttgtagtttatgctgaagcacatgatcagctctatttggtgtttatcaggagctgacaccttgatattcccaccatctcccaggctagttgctccctcgttcctggattagtaaattgtcctaactattctccttgcctggaatccaccctaccgtctgccaccaaacttatcttcataaatgtcagctaggtcacatattccagtaacatatagcttcaaatccctgaaagtcagtgtccttcattttgcctcatcacccccaccccatgacccagagtcacatggccagctatagcttctacttaccccaatctcattcttctccctgagccactggtcacctctcttgaatgcaccacgtgaattcctgtgcagtgttctttgatcatgaggtttggtttttccacatagatgctctttctcctctccacctgtggacttattggtttcttcagtaagtacatactgagcctggctgtgaaccaagcactgcactggactctgggaacctagaaaatagaaaataagaccttccctcaggaggctcccagtctgctggggtacatagacataaaagtaggcagcataaagaagggcagtgaaaaggaaacaggaatctttagggaactgtcatattctacccattctttatgaaatgctgcccaagttttttgtgtgtccaaactgatttttcccttttataaatccttataattctaattctcctgcatcattcattttgacatttagtcacatactgccttctatggttatttaaatgtttcccacacgtgtcgtgcttccacaggtggattttaagtgccttgaaacagggtgtatgctttatgtgttttataccattttcatcagttagcattagctgtgtaacaacacttccaaatttagtggcttaaaacaacaagcatttactatttctcacgattctgtgagttggctgggcagttcttctagtttggactggctcgactggggctgaataatctgggatagaggtaggcgaaccatagcccacaggcctgccacctgtttttataaatagggttttattggaacacagccactcccatatcgtctatggctgcttctgcactacaacagcagagctgagtatttggaatggagatgatcatatggcccacaggcctaaagtatttcctgctggtcctttaagaaaaaggttgttaccccccattctaggatggttggtctggggaggcctcccctgggatgactcatctctgttccacatgttctctcatcctccaggaggctagcctggaattctttatatgatgccctcagaggtaaaaaaaaaaaaaaaaaaaa

SEQ ID NO: 57804 - DNA, 603 bp, Homo Sapiens
cacctgaggtcaggagttcaacaccagcttggccaagatgatgaaaccccatctctactaaaaataccaaaattagccgggcgtgatagcgggcacctgtagtcccagctacttgggaggctgaggcagagaatcgcttgaatccgggaggcagaggttgcagtgagccaagattgcgccactgcactccagcctgggcgacagagcgagactccgtatcaaaaacaaacaaaaaacaggggaaacaggtgagaggcctgtcttggggattcattgtgattcctgcggcagttgcctccccagacacccagagcttgctggtcatcccagacccttgggcaagggcaagacagcagcgtccagcagtcggcttgtgcagggcagccttccaattgcccaaaatatgcgccctcccggacaccatccttggaagagaacctagttccttaccgatcctttcgtgcctcagtccacccagaccaattccagccttggtgaggcgtttccctctgaccaagcacccacccatgggaggcccgtgtcacccggctgcgtttcgcatctctgctcccatgaataaatgtatttactctaaaaaaaaaa

SEQ ID NO: 57805 - DNA, 1211 bp, Homo Sapiens
gaattgtacatcgtaacaaatggagattattcccataaagtcctcatgacttctgaactgatcttttgcagaaccatattggccccccaactttgccttatccttagacatttcagtaaatttccctaatcacctccacaatcattcaaaatgtatttgtggcctcatgtaatggccaaaaaagaccactcctcataggaagatgttagattacccactacatttcttacctttattacaaaggagagagtttctaccctggcctggaagcctctatgcccctgctgccaatattttgtcctcaatgcaccagatgacatacttcagagctctgctgtggtacacttgataaagcacattgcagaaccacacacttctttgataatgcttatatttgttgcatgtaatacaaagtgggaacttctacaacaaaataattaattagaagaacataagtactttacagaatccaagaaaccaaagcagcaagcatgcttcgcaaggacagaaacaagggtagctcaagagaactcaatagtaggtattctaaataatgttctctatacagaaatggcagtaatgaaacttagaggaaaaacactgagttttggggtctagttccaaactccaaattatcaggaaaaatacctgattggctcatctagggtgaggtgacaagtatcaaaccaagtagcaatggccatgggactcagtcacacagaaaatagaagaatgtgtgtacagttggaaggtctcagagaaaaggagtctgttggacagaatgaccagtctgtgactactgccatttttcatgaccatatatcaacccacattacagatgtaacttagtgagagaaaacatctccctgttttccttcatatattatgaaatatttactttttctagtattttgtctatcttacgtcaaagatttaaatatctttgacctcctgtactaaataccacgccacatcagttttagttgcctttcttttttccttaggctagttttttggtataccatttctaaaccaatggtaggaacattttaaggcatcttttgtctggaatatgttttagcatgtacagcatgaaagttttatatgtttattaatttttgtttataattgttaatgaatattaattttgttaatgaatatatattaaaccaattaataaacagtcacaaagctgcaaaaaaaaaaaaaaa

SEQ ID NO: 57806 - DNA, 397 bp, Homo Sapiens
gtaggttctcatatgcatacttatgatctcatggttacgaggcatttgatgttcctcctccagctcacattcctatcccaggcaggcaggaagagcaaaggggtctatatctggaaaacataagctctcccagaagccctctgcctgtgtcacatgactttccttagctacacaggagtccaggaaaatttttttttttggcttttctaaacactcctcctctgaacaaaattacacttctgttactgaggaagctgggagaattgatatcagagaagcaactagcagtacctgttatgtgggatttccagcactcacaaatggttgctgaccttttaccttcctgggaaaaaacagaaaaactaaaacagcaacccagagttctttaaaaaaaaaa

SEQ ID NO: 57807 - DNA, 265 bp, Homo Sapiens
ttttttttttggttgcagacatttaaataatctatatttgtagggtgatatcttggagattactttactatcaatatatagaagtaataacctggtagatagcattacctatgaaaggtccatcccatctgctattcttgctgaaagcttttcatgcaccagtaaactcagtaaatatcagaagataaagcataagcctaccacgccacggatttactcctaatgtctcctcaaagtgcagcccgatgcaacgattacaaatgat

SEQ ID NO: 57808 - DNA, 560 bp, Homo Sapiens
tgacagatattaaaacatcgactttatagacgccagaaacatggtcaatacattggccctgtgacactttaacatcaaactaaggcacctttgcagcaatgatggatgagacttagaaagaaggccatcatttgccctaaatagtatagaaaatattttttatgagagttgaaaggaggaacaaaaattgaagtataaggagtccttgtaggccagcctgtatctaagtttcccattcacatggcattagcagacgaaatagatttgaaatttccagggtttctaccaatatcttggtggattgcagagtatgttaaaagtatgagaaatatatatatatctcaaaaaaattggacaataatattcttggtgtatttctcaagtcatggtggcaagtccctgcagttatcttggtggagggtattatctgagaagtcagtaagtacatgtaaaggatggttgtattttggggtaccaaagggatgtgggggggtgtgcgttacagttgggacagggcagaggtcctgtgggaagctgaacataaagagagtcacttggaa

SEQ ID NO: 57809 - DNA, 555 bp, Homo Sapiens
ttttttttttgtatttttaaaacctttttaatgggtgtatttggacaaaaataacccccttttcacattttatgatgtgcaggtattacattgctttttacatgtggaaaagtgagcctgcatttatttttaaatgcagttattaaaacatttttgtattccccatcaatgaaaattttcagtgtgaacaaatggtgaatcataagacagttcagtgcttattttctgtaggttttagcaaaaaaatttataaaccacaaaatatttatacatcaggatggtaaatttacatcataaagattgcagatttaatattttccattgtctctgttctgagtgccatgcttgtaacattgataggaggtggacactaggcaactggtattagaagttcatttttttactgaaaaattcaggtacattagccatttgttattttatagtgaaccgtttcaatgtttgtttattgttatttgttggcaaaataaaagtgccttaagttaaaagtttgttttgagatccattaaataaatcagtatcatcagttcataatgc

SEQ ID NO: 57810 - DNA, 455 bp, Homo Sapiens
  misc_feature (6)..(6): n is a, c, g, or t
  misc_feature (142)..(142): n is a, c, g, or t
  misc_feature (247)..(247): n is a, c, g, or t
  misc_feature (260)..(260): n is a, c, g, or t
  misc_feature (295)..(295): n is a, c, g, or t
  misc_feature (342)..(342): n is a, c, g, or t
  misc_feature (353)..(353): n is a, c, g, or t
  misc_feature (363)..(363): n is a, c, g, or t
  misc_feature (399)..(399): n is a, c, g, or t
  misc_feature (406)..(406): n is a, c, g, or t
  misc_feature (418)..(418): n is a, c, g, or t
  misc_feature (423)..(423): n is a, c, g, or t
  misc_feature (429)..(429): n is a, c, g, or t
  misc_feature (435)..(435): n is a, c, g, or t
  misc_feature (444)..(444): n is a, c, g, or t
  misc_feature (451)..(451): n is a, c, g, or t
ttttcnttctttcttttgaggtagagtcttcccttatctgccaggctggagtgcaatggtgcaatcagcttaccacagcctcaaattcctgggctcgagtgatcctcccacctctgcctcttgagttgctaggactacaggngcacaccaattttttttttttttaagagacagggtcttgccatgttgtccaggctgagctcaagtgactcttctgcctcagccccacaaagtgctgggattacanggcaagagcaccngcacctagcatcactgattactttctaaggccaanttcccttttggcctaagctgggactgtaaaattcccttgtggggcanggaaattgtantgtctcaatnttctttgtatctacaattaaaacctgaacattacanctagggngaattaaaaganccctntccagngaacanggagttctngccttangagc

SEQ ID NO: 57811 - DNA, 645 bp, Homo Sapiens
ttttttttttttttttttaaagacagtctcactgtcacccaggctagagtgcagcagtgccatcttggctcactgcaacctctgcctcccaggcgatactcaagcctcagccaccagagtagctacggttacaggtatatgtcacaatggccagctatttttttctttttttttttcttttttttgtatttttagtggaggcggggtttcaccctgttgcccagactgatctcaaactcctggcctcaagtggtccaccctcctcagcctcccaacatgctgcgattacaagcatgatccactgaacctggccctggaatgttctatatcttaactggggtggtggatccatgattatgtacacgtatacatttttaaaatccagagaactgtatatttaaaatatgctaattttatagaacataaattatgtaaattatgtctcaataatatatgtatatgtatgcatatacattttctctctctctcacacacacacacacttctgtgaagagaattattccacaggcccaattttatattagtaaaacagaccttacttttgagtgctacaatccaatcgacaaaaatgcttgaaaaggttaagattatttatgaaaatgtttactaattactatctgagta

SEQ ID NO: 57812 - DNA, 579 bp, Homo Sapiens
tgatgaattatatgacttaatgaacagtggggccatggaggaaagttttgtttcatggatgatgagtgaatatctttgctagactcctgagccactttcctgcctgaaagtcttaaggtagaagacctgattgaatctttccttggttatcatttatactgattgcttgatggccttttctgtgaagatcaactcttattgtttggtcctcatagatgtggaagttgcaggaggatggagactaagtgagacaatgcaaactaccctggaagaaaaaccattttacatttctgatgtgattttttttctttgtttctttttttgctaaaaatggaagggagcaagagcatgcagctgaggtttccagttagctagattccagttaatcaggctttactgtagatcactctttaaaaagcagaattttttaattttttgcaatatgagcccctccccctcctaaacaggaagtgggatattttaaatcagcctcaaagtttaaaggatgtgaatggtcatataatctgctaaaaatgacgtcaatttctattctaaaagctaggatcaggagagctttta

SEQ ID NO: 57813 - DNA, 1804 bp, Homo Sapiens
gttttcagtttcagtttcccagaaaggaggtgtctctgtggtgacgagcagggcttcatccagtgcctctgtccccaccgaggggactatgggagacatggagggtgtgtgagcaacaggtgagactggagccagctgaaaactgggagaccgacccagccaacaaacaatgtcggtctctgtcttggcacctgcaggaaacaagctcctacttccagaaaaagtgctcctgggactccaggataccaggcatctgggtaagctacaatgcttaaccacttaacacaatcaggaagcaacagccatgcattcgggaaaggaacttcagtgttgtgtggctcagtctccagacctaactttccctttggtacagacgcggtggtacatgcctgtaatcccaacacttaggcaggaggatcactcgagcccagaagatcaagactagtgtgagcaacaaaatccttccctggcaccggttccaggaggacctcgttcttaggcagcatctgtgtctctgttttgtaagacacacagagtatccttaacccactgcagatatttccctgggtccacggtcaatcaacaccacctttcagtctccagcctcttaaccagcccagggctgagtgttgtttatagtattaatatgtttctggctgggctcagtggcttatgcctgtaatcccggcactatgggaggctgaggcgggcggatcacttgaggtcaggagttcaagaccagcctggccaacatagtaaaaccccgtctctactaaaaatacaaaaatgagccgggtgtggtggcgtgtgtctataatcccagctactcgggaggctgaggcaggagaattgcttgaacctgggaggtggaggctacagtgagctgagatcatgccactgcactccagcctgggcaagaaagtgagactccatctcaaaacaaagaaacaaacaaagtattaatatgttccccttgatcagtggggtggttcacccttgtaatcccagcactttgggaggcagaggctggcggatcgcttgagtccaggagttcgagaccagcctgggtgaactagcaaaaccctgcctgtactaaaaatacaaaaattaactgggcttggtggtgcgagcctgtaatcccagtggaggctgagacaggagaatccttttgtaatgcctgaccttgtttttttactaaccctattttaaccttgtttttactaaccctatttttaaattttccctttttgtctccttaattacctaggcttgtttcccatatgagtagactctcccttagctgggaaagcctgacgaacgccatctggccccttgatttacaagacattaagggctacttacccaacccccttcctcaaagagttaacctgcgtaagcagatcctcagcatttcaaaggagcccaattagctgataaggtactggaacaaacaatgtacgaagttcccaggattttgctcaaaagcataacaacataaagccttgagtctgtgtctggcatagcatccatatctaactcttatgaaggatttagagcccggcacctggttccgttgctttttttgtaaccatttgtcttttaaattgtttatttctctgtaaccatttgttttttgattcttgcatgtttttacttctgtagaattattgcatttgagctccgctccccttccgaaccaaggtataaaagtaaatcaagccccttcctcggggccgagagaattttggaaagtcaagccttctcttggctgccggcttaaataaaggactcttaattcgtctcg

SEQ ID NO: 57814 - DNA, 549 bp, Homo Sapiens
  misc_feature (431)..(431): n is a, c, g, or t
  misc_feature (440)..(440): n is a, c, g, or t
  misc_feature (456)..(456): n is a, c, g, or t
  misc_feature (474)..(474): n is a, c, g, or t
  misc_feature (488)..(488): n is a, c, g, or t
  misc_feature (524)..(524): n is a, c, g, or t
  misc_feature (526)..(526): n is a, c, g, or t
  misc_feature (544)..(544): n is a, c, g, or t
  misc_feature (549)..(549): n is a, c, g, or t
aagacaagatgcaggaagaagaaattgagaattcactacataacttcccaccatcaaggctttacaacagcaacattttgttttccttaaatgttcctgtttggtagtccaatgctcaaaaactgaagacagtatgttttggatcacttttgtcctggaagaaaaaaaaaaaagtctaggggtcctctacaaatagttatgaccaaagctcagcaaagaatgggaatgactgcaattaaatgccactggccctggctcactaacagccagccagtccctgctatctggcaacctttgtgctagcttcctgcctcttgctacacagagaacacagggcctgtcttagctcaggccaccataacgaaataccaaagactgggtgacttaaacaggcgaacctgattttctcacagttctggaggctggaaatncaagatcanggtgccagcatgatangggtcttggtgggggctntctttctggcttgnaaaagggcactttctcttttttaaaatggaatgggnancctatggatggctggacncacan

SEQ ID NO: 57815 - DNA, 373 bp, Homo Sapiens
gccaaacctttggagacactttttaaaagcaagccattttctcaaatatatcaaagaatataatggaaaaagtaaaaagactaagaaaaagttgagagcaagagctaggttgaagacttcaaggttccccttggtaatgagatgaagcgtagtgtttagaaatctgaagtggggactggttgaggtccttaaccagtagataagagttttatgagccagcagattgctagctatggtccatgtcatttggaagagaagaaaaagcatgaccagaaccccaaatggtatttctggtggcgcagcttcaaaggcagagccagagtatagccacattttaggaatgcctgcccattttccaagcctggttctccag

SEQ ID NO: 57816 - DNA, 628 bp, Homo Sapiens
ttttttttttttttttttgcctggtccccacatgttttgggttttgtgacatattgctgggcccaatacctagaaaatggaaggctccgcctggggcctgtccacagtggatctggtgacatatctctgcattaatcacctaagagatgtggctgtcttcttctccctgaaccctgcttacagggaagattgtgacatattgctggcatcagcaaacagacgatgtgtctctcgtaattgggccttgcccacagaaagcattttgacatattgctgggcttattactgaggtgaggtgactctgcagcctgcaccctgcaggggttgtaacgtattcctggctgagtacccaggtgatgtgactcttctgcctggtcccttgtgtcagggaagattgtgacatattcctggcccagaatacaggtgatgtgactctcctgtttgctccctacccacaggtaagactgtgacatatatcttggtccaactaacagttgcaataacgactctcatgccacacatcagccaatagaaaggatactgtcagttttagctgggattagagaaaagggtaagatcccatgtctcctctttgtatgaaggttatagaaaatcctcgttccgaatt

SEQ ID NO: 57817 - DNA, 464 bp, Homo Sapiens
gaaacatgctgccagtcagctgcccaggctgaagtgcagtggcgagatcatgcgtcactgcagacttgacctcccgggctccagagatcggcctcccaagtagctgagacaacaggtgtgtgccacgacatccggctaatttcttaatttttctgtagggatgggatcttactatgttgcctaggctgttcttgaactcctgggctcaagcagatgatcctcttaccttgacctcccgaagtgctgggacttacaggtttgttccaccatgccagcccacaggctgttttttaggactagaagacacttctctcccctgtatccttcccttcttctacatgtgcaacctcattcctgcgctacagctctctctttaccaggtggatggcacctatacacctacagcctgggcatcagcatcactgctggcgtctccccctacccaacgccagcccttacttcac

SEQ ID NO: 57818 - DNA, 2869 bp, Homo Sapiens
aaaagccgccgctgccgccgccgggggtgggagccgcgctcgcccgcccgcccctcgacttgcgagggcgtaaaagtttgtctcagctcgagcattcctagcgccaacacgccctcaggtaaaggtggaagtaaatggccacgctgtattgacagagacagggactgagaaacggaaatactaccatcctccagccaatctgttgggaggactgcttgcagaggactcgtgctccagatgttgcactagaggcgctgcaagtgtgagcagcaggtagatgaaactcaagagaaaaggtgtggataaatgaaactagcccatgatgaacctgttttctccgtgaccacaatattaaccaggatgaatggcggtggcagtgggcctgcatcacaggttgcagcagatgttctcaatatttctattaaaatttccttatttccatatgcaagaggagccccagagctgcatccttatggtagctaccatgccgtgatgtaagctgccattcactggggagctttggcaatagaattggctagatcaggaagcctatgtcaactatggaacaacaacttgcagctcatctctattgatgatggaatctcgctatgtcaccaggctggagtgcagtggcgcaacctcggctcagcgcaacatccgcctcccgggttcaagtgattctcctacctcagcctcctgagtagctgggattacaggaatctaatgaccattgaactgtggccatgacttcaattacaagtattttcttcactaatgtcagactgtgggcctttgtatatacacttttaacaaactttttggaagtgcaatacatatcgcaacaacttctcaatgctgaatcatagtattggaagacattttaagcaacaattaaactcaacttatttactaccaataatgtacataagtcagctgaagtgaggataacatgaatagcacaaatacattatgattgctgcctggccaacagtaattataagaaactgtcagttttgagatgtgtcttgatttcagagatgttaaaaaagtttgtaagttaccattgataaaatatgagtttgcttccacaaatattctttcttctgtccttctggaactcaagagtaaacatatattagattttctcaccatttcatgcatgctggttcctaggctactctctgagtcattttttttttcttatctgccctccagttcactagttctgtcattttctgggtctgatctgctgcaaatgcaatacattgagttttaaatttcagtcattgtgttttcatttctagaaatttcatttgactctttctcaaattacttttccattttttttgtagtttcctatccctggagatattttcaatcatgccatttaattttttaaatacgcaagtgtagttttataatttgtgtctgataattctaatatctgaagtcttagtaggtctgtttcagttgtcctgtaattatgcatgtttttgcccatgttgctttgtttccttgtatgcttggttatctttcttactgcccttgcaaaattatttggagagtcctggaggcttaaatgaagataacttttaggaataatttgcatttgcttttgccgaggatcttgggatcatttcaaccaaaatcttagcttgaaattccgcaatcaatcaaggtgatgagaacctggtcagtaaatcctaatgagggccaggctgtggccaaagatttttagacagatgtttccctcctttgccatttctcttttctttcctcctctgctcctcttagtgtccagacaaccttcatggaagtccttggggtgggtgggaaatgaggacggcaggtttcattctaggtatagccctttgaggtctaacttaatgcagagagagttttctggtctatgtgccaccttacatgggatcttgagccttgatttctaaaccccttgcctttgatgtttcagaattgaagcttaaatttgccaacaggcaaatgtcctcaaggcaaattggcttaggtgttcgatattcttcttaccagaaaggtaaacttgggttttttacttcacccaggatttggcatgacagttccccattatcttgtcagcttagtgctttaagtgattgcatttaaaaaaattctgcattttcagtttttagcaggaggaatggcctcaactagtggttttcaactggggatgatttttttcccctaggggacatttgataatgtttggagatgttttagttgttagaactggggttgggggaactactgtcatctggtggggagagaccggcaatgctgttgatcttactataatgcacaggccacccccaacaacaaacaaattacatagccccaaatatcaataatgccaaggtccaaataacctaaccttccattactgaaaatagaagttcaagaagatagtttataatttaaaaatttttaggtcttaataagttgtcatactttcacaggttttatttcatactaagtaatttatttcaaattttacattccaattacagaaaattttctaagccagtttttgttcttcatgagtattactatcaaggtcacatttttcatctagtatgttttaccctggtacttgttggcagggtcaggactaaggtgagatgcgcaaggcatttgcctcacacaaaatgcacaatgaataaaatgtcaaaactttaaataaagacagaatcactaaaagtactttgccatattggaacctgaggcaaaaagaaaaataagtaataatatttaaaattttgatctcttgttcattgtagatttttacattaattttgattgtttaaaacattgcattaaaatattatttaatgtg

SEQ ID NO: 57819 - DNA, 548 bp, Homo Sapiens
ttttatttagttcaatttatttcaatttttatgtttaactttataacatggtgaacactggtattcaaaacagcatcagagaattctcaagattaaaaaaaattatcaaagatcaaattacattcaatataggtgaacttatcaaggcaggaaacatactaacacattttataaatattcaatttcagacgtgaacaaaaaggtttctggttaaccttgacttaacaggatgttcaacttttgccagtgacccaaagcacaaaagtttaatcaaatattttactctatgtaaagtagttggtctgtggcattcaaagtcaataatccagaaatacataattagaaaagcattcaagataaacatatgacagctgaagctgtcacatttttctcatggtcataaaaacagaacaatcaatctttaaattaaaaattttagtattcacttgttaagtggtatagcatcttaatattttaaaagttgaattgtcttccagacatggagttctaactcacctttttactaccggtttaaggaatattttcta

SEQ ID NO: 57820 - DNA, 2086 bp, Homo Sapiens
tggatatttgtctgcatttaagagagttaacagaaaggatgtttcctgtaatttattgcctacttctgccttaattgggttataattatagaatgaaaattggattaaatttctgtaagcatgacaagtactgaatgtacagcaggtattcccctagcaaacaaaatggcttaggcaccaggaatatgtacaacatgtgttcctttgtcctcaagaagtacagtccaactcaggccaggaagagaaaggtaggcagtgtagcatagtggttaagagcacagactctgagccagactacctgaatttgaattctttaacactctttaccacaaaacagttcattttagggaaacagataaaagaattagtttttagaagcatatacatcttgtaataagcaaaataaacttcaatatgggtctgaaatttattttgcttattatatttaagcaaaaactaggccatgtactatttgaggaagcagacttatttgcctttttgcatattttataccatatattaaaaccagagtccatttgtaaactagtctacaaacaacttcagagtttagaatttgtccaaaatatttttgtttgccttgacaataatgaatcattatccattaatttatttaaatctatcttttaatttatcaacttaatgtttgtcttatggaatagtacacaacatgattaaatgagatattccaccaaaagaagttttcagatcactgaagtttaccctaccagacccccaatttttttttgttttgttttgttttctgtttttttaatcttgttttcacttttgagacagggtcttactctgtcacccaggctggagtgcagtgcctcaaactcctgggctgaagcaattctcctgcctcagcctcctgactagctggcaccataggtgtgtgccaccttgcccggctcactttttttatttttcatagagctgaggtctccctatgttgtccaggctggtctcaaactcctggcctcaagcagtcctcccacctcagcctcccgaagtgatgagattaggcatgagccactgcacctgtccggtttttaatctcaaccttttttaaaaaaaaagtccataccttaataaacagtatatcaaatatgacttaatcttgtagaatcaagattttacaggtagccctgtagcacttagcccacttttcagagaagattaatgacttgtcattggtgtcatcttgtgacgtaatggcagatcaaggacttgaacacaattctactaactcttagtagagccgactttccaatgtacagtaatgcctcaggtttttcatttcgtgtcttattttactgtacaactgatccagaagagagagcaatgtgtgacatgggataatcagaatgacttggaagtattgagaaatggcaagtttgtcaaatgcatgagacttgtcctaatccagttaggcagttctttgaagcgtttgaagaaagtattaatttgagatacccataggaactgttaaaagtttgcagtaccgtttgaggttgtaatgaaaggttcaactattctgcgttcctaattgtcttcggttttgtgctttgcttctagctttcagttcttgctgcctatttccaccggctggtcttatagtcagtcccctgcttttatctattgtctgctgttatataggacaggcaaaactgggtcaacactgtctctgctgcttactagtttgtgactttaggcaagttaacttctcagagttttaattttattatcttaaaactggagtttataatagttcgtactttatagcattgttgtaaagatgaggtctttttaaaacataacaactagaactactctcaaagttccaaatacaaatgctattttctgtttctagtaattttcctgttaactactcaacatttaggtgactgttatagctgcagaagcacagtacgcttagagctttaggaagtgtcactaataaactatgatatctctaattaaatgtctataaattataaatgtctctaataaaaataataaagtaaatcttataacttacaatctaacaaaaaaaaaaaaaaaa

SEQ ID NO: 57821 - DNA, 532 bp, Homo Sapiens
ttttttactcctggcaagctgtgagcttgttgacttttatttgacctcttctccatcacatcaaaagtgcaatgtgaataatacttattaatgagtatattttattgatttcatcatttgttaatatcagattttgactaattcaacatgaccttaagttatggtgccaaaagaaaacacatccagataatgtaatccttaaatctttggcattactgtaaaaggaatttaacaacaacagtgggctactttttttttttggtttttttttggtagggttaaaatggtaataggcaaaaatagtctcaaacaatacctcccggaatagctgatcttctacaggtgacataaacagacatgtgaagagtgcttgatggaagtataagtctttactgatttctgggtgatttatacaagatttaataagagccattgcttcgggtatgcgttcacaagcaattaggtatctggcacgtagttcaaagaacagtggattttcagaacttaaatatttgttcactatattaaaaag

SEQ ID NO: 57822 - DNA, 416 bp, Homo Sapiens
  misc_feature (394)..(394): n is a, c, g, or t
aatggatagcttctgtataagggataggaaagcagacttaactatttaacctgaccttgtatattaatttgtgctcttttggggagaaacacagcctattcattccaggcatgcagtgaatgctaaaaaaatatccacaaacaacatagaacagtgattttcagaagaagggatctagtgtgttctctgtgttcttaaagacagtgctttgtctgatatttttgcaaaaaagttgagtcttaagtatggtgcttggcaaaagttgctttatggaaaatggaaggcaaataagcaaaaagagatcatgccaaaatactccctgttttcagggcagattgttattccatatggggaaagaatatgaaaaagttctcccacccaagaccatgaaatntaagccttcattcagttgacag

SEQ ID NO: 57823 - DNA, 1573 bp, Homo Sapiens
agcggcttaatttaagattcagcatttatatttcaggaagtgacttgaaccaatacaggatgtggaggtctgatttgacagtaatctacataaagaaaacctggggtttgtgttgaccacacagttggcttgatgtgaaccaactgtgtggttcctctgctgaagaaattaatcctatataacaaatgccccaaacctaatgcaagtgcaacctgcattaacagaggattgtccagctcttaggaagttatagtccagctgctcttcactggtagaccacatcttaaaagtaatattaattcttcagagagggtcagccaagatggtcagtgggtctggaaaccatgtaacattagaagcctggtgaaaaagaggagtcggggacatcctttctatccaagaacatttaaaagggatgtcatgtaggaaaaaaagtagttttcctgttgttaagttggccgaaataggttaaatagatgcacattttagctaaatggacacgagattctttttattttgaactaccagtactattcagcatgttatgggtttcattaggatgtagttaattccctggtttagaagtgttccaaatagaattcatttaacagatctttaatgagtactattatgtgtcagacactgttctaggtgctgaggatagactgagatggtgaagattaataaaagaatgagttgagataaacagagagtaaactgatacatatcaacggtattcccccgttagtcctagaattggggctttggctcaaagttgaggaccagaaaattaagtgcccctttttctaagttgaaggtgctactggcccctggaatagctctcttgaagtatttattgagaggcactgggtaagaaccaaccttaccactaagcccacctgcaccagtcagtataagaagacttcttctccccttctggggagtgctttttcagagctgagctatcccctttcctcccatgagggagaagacctcaggtgttagagcagctccacttgtaggcatctggggagtggccaaggtgcaggagctggaccaatgtgtaggagtaggagtttgaagcactcaacttgaggaaaggcaaaagaatcatcgccacccgctggaagggtagcagagagggtgctgccttcagaaaaccccactcctcacctgggcagatttcttggtcaagactatactgactcagcataaaaccttgaacaccttttattcgccaggcacataaaaagaatcttttgagtgttgataatggggtaggttgtgtgtttgttgtatggtgaggttgggggacagaggacatataagaactctgtactttttgatcaattgtgctgtaaaactaaaactctaaaaaataaagtctattaaaaatggaactttatctaacaaggaggctccccatctctcagcctggcaaattgggtaaagagtcaagacccactggtgtgctgtattcaggagacccatctcaaatgcaaagacaaacataggctcaaaataaagggatggaggaagatctaccaagcaaatggaaaaaaaaaaaaaaaaa

SEQ ID NO: 57824 - DNA, 2005 bp, Homo Sapiens
agcgggttcctgcgggatcggttcccatcatccaatacctcccaccagactccacttccatcattggaggtcacatttcaactaagatttggaggggaccgtatcctaactatattaacttccaattttcatcgaaagcccacctgtctaagaagagctcctagacattccctttccccttcaacttggaggaattgggaatgacaaagagaaattaatcaaaagaagaattaatctctccaatcagccttggcattttctttctatctttgatatgttgttttttacagtgtcttggttttcagaataagctgtttgtaactacttcctccactatattgtgagcctctggagggcaaggtctgggccttactcatctttgagtaattttaaagccactaaatagggctctgcacatagtgagaattcaacatatgcttagttgaatctaatatttcagaaaaagtcaacatctattctttaagatagcccacagcaggctgagtgtgttattcgtaaatccattggccagcgtcatttcctccaaagtgcagcatttttgatagaaccaaaggctcatgactgaccttcagaaagacattttgtatttcaccatcaaagagtggtatgggttttattagacttccgtaatccaggtctcgtttctcaggcaactctgaagcgtatcacactttatctgagagggtcacaattagtgaaggaaggaattggcctttgcaagtttgtgttgctcacgaacttattaaattgcttgatttttttttttcttcctagctttgatagattgactttgcctcttttactgcgtgcatagtgccatcttgtggccataaagcatataacactcatagttatgccacagtgcttctgttccatcttatttctgtagtccagaggatctcttaagtgtagaaacacatggattattactagccaaggccatcactggccaagcccatctaaaagccagaggcagcaagcagtgcccgttgaaacatccataaaaggtgatatttggttagcaacgtcctactgtagacattttgatgtggtggtgattggaatatggtctgcagagatcaaccagaattagctccatgtgccactgggagtgggaactgaagtcacgcaggaataaaccagtcttcatgctttaggatgttctgatgtgccattgtcgtgaaatcttcattcatgagacattccagtttaccggcagtgtcgactagaatatgctacagcccccaaaatacgtttttagtataaggattattttgagctgattattttgagaaatagcagacgcaggagaaactctgaagacagaacgcaaacttcagctagtgtcttgaatttaagtcccaaatcatctaagaagcggtcatctagctctccttcaataaaactgcaacaaccaatagaagcattcagcgattcagtttcttcctgagaataaaccagaaggcaatctttggctgtgtgattttcatcttcctcagtgttatatatcctctgcctctcctacggagctcatccctaccaagcctgctcctgcagagggatgcaactttccgacccactgacatctgtcttggtcatatgacttgctttggtcaatgaaatgtggtgtaaaaaggtggaggctttgagagccattgcctggttctgccttgttcttttctttgggtcacaaggacggcagcttcccaggtacaatctgctctctcagtgtgcatcttgatatgaagacatcatgaaggaaagcagagctgactgactggcaaaaacataactgtggatagaacccaaagagaaaacaaagcccaaacagtctcagctcctttactctatgcgaccaatggcatttcaacctccctctacagtttgataccttcttctatagttacagaattcttaactttgttttgacctggatccatggccacccaaaataaagactatatttctaaaaaaaaaaaaaaaa

SEQ ID NO: 57825 - DNA, 393 bp, Homo Sapiens; identical to SEQ ID NO: 38631

SEQ ID NO: 57826 - DNA, 550 bp, Homo Sapiens
  misc_feature (482)..(482): n is a, c, g, or t
  misc_feature (504)..(504): n is a, c, g, or t
  misc_feature (539)..(539): n is a, c, g, or t
  misc_feature (544)..(546): n is a, c, g, or t
gagatggagtttcgcccaggctccagccttgtcgcccaggctggagtgcaatggcacaatcttggctcactgcaaccaccacctcctggtttcaagcaattctcctaccttagccccgccccgagtagctgggactacaggcgtgtgccactacacctggcttttttttttaaattagagacagggtttcaccattttggccagtctggtcttgaactcctgaactcagatgatctgcctgcctcagcctcccaaagtgttaggattataggcgtgagccaccgtgcctgacctatattaagactttttatacccagaaacattatgccattacgttgaatatcacggttctgtctttcaagaagaaattaagtcttccttcaaccccataagacaggattgaaaaaaaaattagttttcttcaaaaaggattattaaatttatttctcaaaggttattattaaatttggtcctcaaactgngggtctggtataatggccaganggtattttactctatttgcatgtcaaaacggttanggtannnccaa

SEQ ID NO: 57827 - DNA, 514 bp, Homo Sapiens
ctttatttaggttttacctgtttgtttcaaagagcaaaaataactccatagaacacttatttatagcgctgttaacaagagctccaaggaagaaataatttcaactatgtttccctagataatataagcaaatatccaaaagagtaaatacatattccagggcagaatcatacatcgctaaaggtcttcagggtttacaataagtaatgtgggcatgtaaaaatttatccccaatggtcaatgaacattactacggattaactctacatcacattgaaatttagtcctcaactctcttcttacaaaacagaatccacagtagttggccttggctgtgctgtgtcatagattttatagggatcaattttgtactttgacaaagctcgtatctaaaaagtttaaagtacaaaatacatctcatctaactgatcttcacgacttctcaacacatgattaggaagcaatgttactaccagtttatcctaacctgtgcaatgagcagagcatgaactaa

SEQ ID NO: 57828 - DNA, 720 bp, Homo Sapiens
gaagatcttaaccccccaatttcatcaccctcaccgcaacctccgcctcccaggttcaagtgattctcctgcctccacctccctagtagctgggattacaggcatgtgccaccacagcacggggccttaattatacatttgaacttaagtgacattttattgaaaactaattgtggtgacgaggaatggtctaagcatatgattaggataattcatattcattatgaaaacttaggtgaaatacagacttggcatttagcttgtcaaatgtaaacatgttttctgctttctttgctaaaatcatatttccaatttcaagggaaaatgttaagaaccaaaatcatctttttcagctacccgcctgaaaaaattattgctatttttcttttcttttttttgagagtctcgctctgttgcccaggctggagtgcagtggtacgatcttggctcactgcagccttgcctcccaggttcaagcgattctcttgcctcagcctcccgggtagctgggattacaggcgtgagccactgcgccaggccttcacagtcatctttagtatgtataacatttcatcctgtggtgtattattacttgtttttttttcgttacattaactgttttgatgatacagcatctcattgtttcttgataaagtatttccttctttttggataaattacctgaagtggaaatatatgtgtagggcattaaaaaaaaaa

SEQ ID NO: 57829 - DNA, 594 bp, Homo Sapiens
gttcggtggaaataagcattctgttatttttttcttagcacattttttgtcttctcttccattcagttatgttgaaagctacgtgttggatctgttttttagttatgacattagatcttcatctgagattatctaaactacgttggttttcttttgattacaatctctttttttttttaatctgctaacacaagctcatgtttatctagaaaatgcgctttctcctcaaagtcatgaatcagcatgaatttcctttgagttagttcaaatcatccagaaattaacaaatttcaaaaaagaaaaaatatactaaaatgtagtcaaagctttataagaatactttatgtgctatatctcagctagtcactgagtagctgtcataaacctatgacataaacctactgtcatataccgatgacagtagagtattgaaaaaccaggtgcaccaggttcttgttttcattcttgataggttctaagttcattaaaccagtctcgcagttactcagagaatcacaaaaccaagtgttcctcttattatcttgcttagctcattttgggtaaaatgcatcaaacggcagaataaaaaaaaaa

SEQ ID NO: 57830 - DNA, 2952 bp, Homo Sapiens; identical to SEQ ID NO: 24570

SEQ ID NO: 57831 - DNA, 525 bp, Homo Sapiens
gttctaattggctggtgggaatctctttaaattagttactttccctccaaacacacttactttatatgcaggagtccccagcagatccgtctgtggtctgttaggaattgggccacgcagcaggaggtgagcagcaggtgagcgaacatcaccgcctgagctccacctcctgttaggtcagtggcagcgttggagtcttgtaggagagtgaacctacggtgaactgtgcacgtggtgatctcggttgcatgctgcgtatgagaatcgaatgcctgatgatctgaggtggaacagttttatcttgaaaccatacccccaactttatcagtggaaaaactgtcttccacaaaaccagtctggtccctggtgccaaaaaggttggggaccattgctttaaagcaacagcaaagtcttaccaaaccattttagatttttctagtccaaagactagatatgataggtgcacaccaccacgcccagttcatttttattttttgtagagacagggtctcgctcggtggccga

SEQ ID NO: 57832 - DNA, 441 bp, Homo Sapiens
ttttttttttttttgagagggagttttgctctcgttgcccaggctagagtgcagtggcgcaatctcggctcactgcaacctctgccctccagtttcaagagattctcctgcctcagcctcccaggtagctgggaccacaggtgcctgccacctcgcccagccaatttttttgtatctccagtagagacagggtttcaccatgttggtcaggctggtcttgaactgctgaccttgtgatccacccgcctcggcctcccaaaatgctgggactccaggcgtgaaccaccgcgcccggcaagacctaaagctttttaaaaagaaattaaaacgtgggccctggacctgctgggcccataggctacgtcagtccggcctggagtggacaggacagctctaggttcatccatcaggaatttaggggtggggacgggagagaaatta

SEQ ID NO: 57833 - DNA, 668 bp, Homo Sapiens
agaagactgtttgtccagcgtgtatttcaggatatctggatcccttttattgactcacaatttgtggcaccactttctcatcccagaacttcattcttatttctctcctcatctggcctcccaagtgctccgttgagctgatgaaaagttctttgtactccctcaacgtgtcggaaacaggaggccacacagcacagctttgtttggggtgggcaggagtcaggagtcttgagcagatgcatcactgtgaagaagaacgacatgtcggggctgcacctgtcctcccgtcggcatttgacgaaagctccctgaagcggggcagcactctcctcctgagagatttaccatttattgcccctgtgaggaatgtgtgcttgggaactgccaagtcttaccccttctggaagaagaggttttctctgacaagagcctagagcgtcggctctattatgctgggacttgacagaggagccatggggtttaaacagtaggaaagaggagccacggtgcccagcccatctcttagtcttccattcccttggtgaatttggaaacttgaaaaacttggggacttgacagcaggctccatgttcttctggcctcactgtactgtgtaaggaaagagctgcttgtcaggaacggaagaggggacgctagtaaaaaaaaaa

SEQ ID NO: 57834 - DNA, 617 bp, Homo Sapiens
aacttgctcaaggttccacagctggcaagtggcagagccagaatttgaactcatcccatttaagagcctgcacatataccactatgctacagtgacttccccatgccatattaataatcatgacagctaatggttgacataacaagaagagaacctgtaatcacccccaggggcttcccgcagcctccttcctattcctaccactgtctgtctgcctgcctcctccctatgcagcagccacgtcacatgatccccgttccttggatggcctataaggtggtcttcctctagtagctgggccctgtcccttcccatctgacaaactcttgctcagcccacgtggcccagtttaaatgtgctctgtgcattccatcatctagtgcttaccacatgatcataaatcccactggtgtatgtgtgtgtctttcccaagttggagtgggagtgcctttgacatgggactgtgtctttccctttcggcatcttgtatcttccccagcatctctggctctccaaagcccccagtaaatgtttgagtaagtgaaacatgcagaagacatgaagattgttaagtaacaaatactcagcagaaagggctgttaattttaaaaaaaaaa

SEQ ID NO: 57835 - DNA, 967 bp, Homo Sapiens
ccacgcgtccggggatatctcagcacctgacttacacatcttacatcctcaagcaaactccccagggcacatttttagttggccagccatcaccccagacttctggaaaacaactcaccactgggtcagtggtccaaggaacactgggagtcagcacatcttctgcacaaggacaacaaacgctaaaagtcatctctggacagaaaaccacattgtttacacaggcagcccatggaggacaggcatctctaatgaaaatatccgatagcaccttgaagactgtgccagccacctcacagctctcgaagcctggaaccacaatgctgagagtagcaggaggggttatcacaactgccacttcccctgccgtggccctctcagcaaacggtcctgcacaacagtctgaaggaatggctcccgtgtcttcatctacggtcagttctgtaacgaaaacttctgggcagcagcaagtgtgtgtgagccaggccaccgtgggaacctgcaaggctgccacccccaccgtcgtcagcgccacgtccctcgtgcctacaccaaaccccatctctgggaaagccacagtatccgattgataccagccagcatacggctggcactggtctaccggaaaaactgaatatcaccgagatacacacacacactcacgcatgcagacaacaccccttactgcctttggataagaggctgtggatgttgttgttgtcattactattattacttcattcatatgtagctccacaccaggccccttgtgtcttgtttggatagagaacaaaaaattaaggctgattatatttttctcttgatttctacctccctgttaaaattgaccaacttctagtatagggagtacttgttctctactaactgttttatttgaggccctgtgttggatactggagtagaaattgtagaaataaaaggaattattataaaaaaaaaaaaaaaa

SEQ ID NO: 57836 - DNA, 1650 bp, Homo Sapiens
cggagcggcgctgggcgaccagagcagggtcgagatgtcctacatcccgggccagccggtcaccgccgtggtggtgagtgcgcttgcgcgggctcctcctcgtcttggcctgaccccacctcgcagagcgggaaacggacaccccaagcaggttgacagagcatcgaacccggggctcctgcgaaccggcggcaagggctcgggtccccgctttgccggagcgggccgcagttcccccagccacgaaacagggatggccgggacccgagagcctcccgagaccctggacagagcccagactgcgtgcgcagggcggggagggccacggggaaaggcctggctgcaggagcctggaaaagcgcccccttcccgggcctccgtgtccccagacggggagctgctgggggcgggcgccgatcccgacgtccatgagtcgcagcctctggaatgaggaaatgcttcctccgctgcagcctgcgccgccgcccggagggagatctgggggtggggctctcccgagcctgccgtggcagcccctgcccccttcctgtccagccttgctcctccaacccactcgccgcctggtccagggtggacgctcgtatagctgcgatgagcgtttcctcttcgaacttttcctgggtctccagcccttaaggcaaaaaagtccaggcctccctcctggcacttgagtcctgagtagaccctccgggggctagcctaggcccctggccgccctctggcttgttttaggtgctgggtgctattagactaggcagagggaggaaggaaggctgggacgttagactcagacgccggtgtcacagagggacacaaccctatgacagaggtggggagtcccagagagaagtgctcagccagaaaagaccacctcaggaaagactcaggtctcctgcctacctcccgacagcgttcagagaatgagaagaaatgcctgcccggtgggcagtaggtcaagcgaaagtccccgccctggagccatagggactgggtgtgttatctcagttgggtgtgctggagaagctccagcaatcaggtgggtggaggcagagaagccactgataaaggcgacaagtgaggctgagcttagagcactggctcaggcctgggccaggaggaaacattgctggaccagctgacagctgtcctaagcttcaccctccctgcaccagcttgacttttttttttttttttttttttgagacagcctgggcaacagagtgagactctgtctcaaaaaaaaaaaaaaaaaaaaaaatggaacgcagggcaagaactcgtatttggaaggagatgggggaaaggagcggtattatacctaagttgtatttgcaggcaaatgagatggagccctctctgtaaagaagagtcatttgtgcaagtagacggggtctgtgggtgcaggccctggaggggcacacaattgcctggaggcttctgtgagatcgggagagggaggagaggcagtctcttgacaaaataaagtatttttattcatttgtatttattaaatgaaaaaacaatcccatggtgtccctgttgtgtggtggaacctaatgactgttgaaataaagttctgtgttttccctgaaaaaaaaaaaaaaaaaaaaaaaaaaaaaaaaaaaaaaa

SEQ ID NO: 57837 - DNA, 300 bp, Homo Sapiens
tttctttaacacaatattaacaccacccatttcatctgaaatcatgtttgatactgtgtcatatgaaaagcaggttgtaccaagaactcaatgagccaagctaatgtttaaggttttagatgaacattttttttttttggattttggttgctgtgagtgcattcaccatgaattaatgttcatgaaaaagctgactatatgagatcaccactttctttgcttatactatgaagttgaccattctgaggctaagggctagtcagacaattttaccagacctggtaatactttctgaaccct

SEQ ID NO: 57838 - DNA, 376 bp, Homo Sapiens
  misc_feature (54)..(54): n is a, c, g, or t
  misc_feature (56)..(56): n is a, c, g, or t
  misc_feature (61)..(61): n is a, c, g, or t
cgagttttttttttttttttttgttgtagttgttgttgttaataaaaaggatantnacatncagaggattataagaaaaataagacatacctgaggttttgtgatgagctatagagaatcaagggcagttccagtggagctgaggctgacaaagtactgcccagctgccagccaaatccacccttaagttgcttttgtatggcctgggagctcagaaggaattttttaaattttttttacagctttaaagtattaaacagaaaccaacaaagaagaatatgagacagggaccgtacgtggtccgtaaagtttaactttctgatccttaataggaggataagcgccgtgatagagaaatccaaaggtcatttgtatt

SEQ ID NO: 57839 - DNA, 2791 bp, Homo Sapiens
ctttttgggaaagtgggggctgctacctcactactttgatgtgtaccttttgttcaagaactttctaaaacttggagctaatcatgggttatttcagaagatgtaagcattttaagttttttattgaattccatccttatttaaaaggcctggttatgtaatattttctgttttttttttttttttgtatggtttcccacattgattaggttgttttcttcattttcttaatagactaaaaatactttcttctctttctatttgtgtcttcttccatttagtatttatgggagggagcaagaagggaaaggatgtctatttttaaaattgactacaatcatgactgttcttcttgtcattctgtagcagctggatttattaccatctcttatttaaaggtccttcagaacacgttgaagcagttcatttcaggtcaatggctggtaagcaatgtcaggacctctggggaaggagaagctgacgggatcccagaggaaagaattgaggttgtttgctcccttgtagaaagcccacagatcccttcccagactagaaaaaaagtgccagagtgtcctgaaactttccttctaaggcacatacttcaaagagactggggattcctttgttttaaatataggtggggtctcacagtgttgcccaggctgggctcaagcgatcctgccacctgggcctcccaaagtgatgggattacaggcatgagccaccatgcacggccatggagattctaatgtggtgccagctgccaggtaagaaagctgtgagacaatgtgttgattttcctttactacgtcaggtttgaggacatcatctagcatcaacgggtaacgtcaccctttgttccatctttgggaaataatagtagtagcttgttactgttagctgacccctacattagcatcaataaagtaaatccctttaactttccttttggcctttcctttctctctctctgcctccccaccagccccgactctctcctgtgtgcgtacacatccacacacacctccatggtattccttctttctcccacctaagggaagctgtgcccgatcttgctgcagtccaggtcaccgtactgagatgagtcagccacagactctaaacactagcagcgattagccgtatgtagccaccaagtgcactgttttagacaggtttacacagctctttgctgtccactcatatcagctgtgtagtagcccaaggcagcctgtcaggcagaagaattaccaaccaaagtggatctattcataagataaaagatccggagtccgtgccctcttaaaaaacttttgtcttcagacatatgggtgcgtgttcatctctggccaaaactttgtttccagtttcaaagggctggttgcgaaggtggccttgtaacctttctgttgccggctctgttagttgcctgataagcagtagctaattcatcctcctcagaatttgagagtggcatctattagattcagaccaccaaggtgcctgcgcgggctctcctggttacgactgagtccccttttctcatctgtggggtgaacgcttctatttgcagaaatttgcttgcatctttttccttttatttattattactttttagagatgcggccttgctctgttgcccaggctggagtgcggtggactcttttcttttgttgatctttgccatcctctgcctggcttaatgaggttctttccctgcgtatttatgtcccaggagctcaccttccccctaggtttttaagaaggaagcagaaaatgttacaaagtataagggattctatgaagtccatagataggatttgctttgggagtagatgatttcttcttattttggtgtaaacatcaatttggatggcaattagaatgtctttagcctctttaaaaagcccttctggggcaaacctttgcaagtcactcagctggcatgtaatgagatttttatttgcatggctttttttttttctaagtctctctagaagaacataaggacattctgaacatgcaaggaatacagttattctcacatcaaggatcaattttattttgtatcttcattttatgtcattttcctttattttattcacattaatctagcattaattccccccagagggaatgatatttttgcttgctgccacctgtgttattaagtgacagcttttctttatctgcttttctgaatttcatatttatatactttattgtagttttttaaaatctattctagctgggctagaatcttccaagtattaattcataatgaacttccctcttctggaattgtttaggagggctaatgttccatgttcccttcgttgctatagatatgaagttatttcgatgttctttgagtgctttattatagcgataactggtactgcctttgattaaaggtgagctatatggagttaagcatttttatactagtaactatttattgagaattttcagaattctatagctacttgtctttaacagttataagaggcatgtattttttttttccttcatggtctggaagttagttttctctttgtttgggtagatcggaatgagttgttgagctgtgttgaaaacacacatgaatcaaaaaagcagatgtattgtagaaatgtgatgttttcatgtttcgggaatttgaccggaaagctttatgtatgggttttatttttaacaaagcagtaagggcttactttttaccaacttgtgtgtgtgtaaagatgtatttgttcaagctttaagaataaacctgtcaatgtacaaatgcctg

SEQ ID NO: 57840 - DNA, 2119 bp, Homo Sapiens
cgagtcggccttgttgcctactggtttataagattttcattactttataagatttcattttacattttacttaagtgtacttgtttcagagagtggtaaagacagatcctgctcctctcaatccaatcctgtagatttcttcagttacctcaacagggtcatactggctcctgaaatgggcaccattatttaaaagaaatagaggtacagagtcctcaagatttatgggcacctgagtttctgccccgtgccccgctgcaggtttcccaatcccctaaagacattcatggatgggtgagaggagctgacacctcccgctctgtgaccactttctctttggccatggaggaagtcttgctgcccctggctgtgacatctgaccccaggccctttaatcaacaactcccagagcctccagacccaagatgtgttttggaaccccaggacaatcctgaactggcacttgccctggtgtgtgccctttgctgctgctttggaatcatctactgctgcttcagtgagggcagggccaaggacctggggggccattgcccaagactgtcatcctcaaggatgatgccagctttcctccttgctcctgggccatctcacctcctctgccaggggttcctacctctagtgtggcccatgttgctctggctgtattcctaggcccatgttgctcttgccagcttcttgtccatcctccatgcccatgccttccagctttcacctctggcatctatcatttgctcttctcttaactcctacctgaaaaccccattcctaaattattcactatatttcagacttcttcactcttctccaaaaacctgaatcagcttgtgctgattttttcctatctgctatccctaaaaggactagaccttctttctatccttactcccctcaatgtatccatcttacctcttgattttccctcccattccctcacagttcctgaaacagtgcccccccccgaccctaagcgacccctttctgcccctggccttgaggtcccttgacgtgctgctcctgtcttctgctcctctagtgagccattcctctcccttggaattcatcagagtcatccctgtagagcccccttcctgcctctcaattcctcctgcctcacttcccaggctactgctgcttcaagacagtgacgtttctctccggtcagctgtcaggagcgctggtgagcttcctactgtgccacaaggtgcgggtgctggagacacagctgagcctggaaatgagagtgggcatcgccgtggtcatcatgactcctctgcggcgtggtcaccatgttggttcactgtgttgggctcttattgacgggtctcctgctaggcctgaccttgggtgccggagccctgctggcttctgagcctatctaccaaccaccttcagcctgggtgccagctggggggctggtggggctggcgctgctgggagccctgctcacacttcggtggccacgtccattcacagttctgggcacaaccctgctgggttctgcagtgcttgtggcctgtgttgactacttcctggaggggctggcactggggagttggctgggccaacgcctgcagacacttccagccttgccttctctctgctgatatagctgggtcttactggggatctggccagccttgggggcccttggagccctggcccagtggaagctcgtgcctgaggaacatggaggccacgctaatggtgagttagtgctgtggtacagaagcagccaacctgtgcctactcatgtccccagttcctagacttaaggagggaaggggagaaatacacttgaggaaggagagtgggggaggatgtccaaggtgaatggggcagggcactgaaaaaaaaagttgaaggagtcaggggaagcaggaaagagttacagaaggaaaggaggatctcagggaagtctaggaggaaaaatagaatttcgaagaatttcttttagaatgaattgtcgggggggtgctgggcacggtggctcacgcctgtaatcccagcgctttgggaggccaaggcgggcggatcacgagatcaggagatcgagaccattctgactaacacggtgaaaccctatctctactaaaaatac

SEQ ID NO: 57841 - DNA, 1773 bp, Homo Sapiens
cttgttagcccacagcctgtaatagaatggacagatgccaccctagttgtgtcttaagaaattaagaagcttttaggtgtttaataaatgagagttgagcctccctttctgggactcacctgaaccacagtctctgagggggtcttgctgcattcacagataccgggtccatccgtagtttacagacaggtgtgggagagctgcatggggaaaccagattctggcatggaaaggactactgcaatttcgtcttcaaagactgggttcaacttgataaaccttttgctgatttcattgacaggtactccacgccccggatgccctggcatgacattgcctctgcagtccacgggaaggcggctcgtgatgtggcacgtcacttcatccagcgctggaacttcacaaaaattatgaaatcaaaatatcggtccctttcttatccttttctgcttccaaagtctcaaacaacagcccatgagttgagatatcaagtgcctgggtctgtccatgctaacgtacagttgctccgctctgctgctgattggtctgctggtataaagtaccatgaagagtccatccacgccgcttacgtccatgtgatagagaacagcaggcactatatctatatcgaaaaccagtttttcataagctgtgctgatgacaaagttgtgttcaacaagataggcgatgccattgcccagaggatcctgaaagctcacagtcttgctctgtcacccaagctgaagtgcagtggtgtgatcttggcttactgcaacctccatctcccgggttcaagcaattctcctgcctcagcctcccgagtatctgggattacaggcacccgccaccacactcagctaatttttttgtatttttggtggagacggggtttcaccatgtcggccaggctagctttgaactcctaacctcaagtgatccgcccacctcggcctcccaaagtgcccctcatgcttcttataactgtagaagagctactgcttgcctgtaagtgggtggtatgggaaataccacactgggaaatctgaaattattgggggaccagatgtctggagacctggattctctccagctctgttatccacaggtatgtgaccttctgagtacgtcagtttgtccttctgacacgctgtttcttcaccaaccacgaataatattatctgttctacgtagcttatatgaatatatgtgaaagtagtttgtaagctgtaaagcaccagttcatgtaagaacttattatagcatttccatgatattcatcatctggaaatatgttgttcactgtaaattgaagcaaggataaagaggcatcatattcaaatcagctgtttcaaaattagtatttatgctagaaaaagaaatgttttaatttaaaagatgcttaaatgttccgtattttaaattattggacggctacttctggataagaaaaatttgttttggtttctcacgactggctgttgttcatcatgtgacttgtttaggcacacgattacaacactctgtctagaggtttgctgccagaaacctatagctgactcttcctgggaatcaatttttgatttccctgttattgatctgataacactctccccaaaatataaagtaaaacaaaatgtattctgaagcataatatgtgtttagtttagtattgttttaattttagatgctatttactttgttgttatttgaagatatgcaagccttctaattgaaatcagcaattgatataattgaataaaaatgttaccaaat

SEQ ID NO: 57842 - DNA, 723 bp, Homo Sapiens
ttttttttttttttttttgagacagagtcttgctctgtcgccaggctggagtgcagtggcgtcatctcagctcactgcaaccttgcctcccgggttcaaacaatccttctgcctcagcctccccagtagctgggactacaggcgtgtgccaccatacccagctgatttttgtatttttagtagagatggagtttcaccatgttggccaggatggtctcgatctcttgaccttgtgatctgcccacctcggcctcccaaagtgctggggtttcaggcatgagccaccgcgcctggcctcactctatgaattttccacattttcttgctcatgttctttaaatctcatatttcttcacaaattttttaatgttttattttcccattcctgtcatttcagattacctaacacttagtaaataacaaaagaacagatttttgtgacttactcacccagttgagcagtctaaacatgggagctgatactcattttccattcaccaaggtttcaccactacccagcattagaattagaaaagtacttacaaagaacctgaagaaatgaaattcctctccatgttcactaccctgatttgtaaacatcatcccaaaattgggggtaaataatgtgcttataaggcagcaggagacaatgctggtggtgttacctgttggcttaaaatatcagattctggaaactcatcgaagtttgaggtatcatcaatg

SEQ ID NO: 57843 - DNA, 2136 bp, Homo Sapiens
agcgtggaacatgtcttatctaaactcttaaaacgtgtttgttgctgtcaaatatgacttgagttcctgatcgggttatcattgcctaaagacacaggactattttttttattaagataactttgtttttatcttaataaaagagatgatagtcatttcctgacagttttgtctgacggaatgccttctgtataatagtttaaaataattatttttagtgtttggaaaacagcatttaaaagtttgaacagcagaagtctgttttaagaagcttctgttaacccttgaaaagaatcttcctgtgggatattaaaattttggattgaacttgtgcaaacagtactggatttggaaggtctggattctcatcctggctgttccactaagcagctgtctgtccttggacatatcacctaccctctctgaatctgttcagttgtgtgtaaggtggaatacctacccgaaggtttttctgtaaggtacattaaataatacatgtacaattctttttgaattgtaaagggctttatgaacatcaattataatcatttcgcttattaggttctgcagaaagtattctctcaaaagttatactttcatcaagaatgaaaaagactttgtaatggaactctaaaaaactgaaacacgtatcatatgacattattcctttcctatatgtatttcatgcatggaattaaaacagaatgtagccttttcagccatgaaggatgctgagtgtttagatttgcaaaccatttttgttcatatatttatatgaatctctacatatttttaagattttttctcatatctaaagttggcgggagttatagtgaaaagtgattataaagattcacatatattaatttattcttaacagaattagagaatgatctcaccattttcttaagttcccaagcaatatgatagcatattagtctgaggattataccatagtaagaagcctataattttaacataaggtccatttgtttttgtttcacaaaataataccgttttctgaagaaaagggctataaacttatgttagcaaataatagtacataatgaggaatttaaaagtcagtttcacctttgagtcccaggaggctctgtatatatcattgttatcctaaaatgacatctaacagtaggttaagttatataggaaaaaatgtgcttttctgtaattaatttattaggcattttcactaatttgtgcattttatatctctgaagagcacactgctagcaacctgattgtaaatgaccagaaggacttatatccaacctatgtgacttaaacatacacttaagtactctaaaccactatttaaaaaatacttctagagagattctgaaatcttaatttggttgcactttctggtaatatattttttgaaaactattttgatatttctttcatataacattattggatctgtatcactaagttaattgtctaaaaggtaactgatttcatcaaaccttccagtattaataatttttaagccattttgaaactgaggcctaaaatactgaaatgcttatgtcgttgtacttactcctttctgaaatgatcagatttttaaaaaatggatttctcatataaataatattatcaaaaaaggatttctcatataaataatattatcaaaaaagctgattttaaaagtttctcccaaagtcttattctagtaattatagagacctaggtaatgagtggcagatatatctgcctttcagatatgccgtaatgtgaaaaataacacagtcatgtggtattctttattaactaaaactgtgttgtttttattttggagtagttctcataattcattggtagggaactatccagtatttatattcctatgtatgtatatcagattaattttgaggcttggtattcctaaaagatttggatgtgtgtatttctttaacttgacgtaaacatgtatcacaaacatatcttttaattccaattaaaggggtgctttggcacatgctgaaatctgggatttttttttttgactttgataaatttatcaaaaagattggaaccaaatgttaattagggtaagttgtctttgaaagtaaagtgaactgttttatttaaaaaagaaaaaaaaaaaaaaaa

SEQ ID NO: 57844 - DNA, 444 bp, Homo Sapiens
tggtggagacagcggtctcgctatggtccccaggctggtctcccaactcctggccacaagggatcaagggatcctcctggccaaagcactgcctatgcaggtgtgagccaccgccgccggcccagacttattttctaactgggctaggggaaagggtagggtctgtgtggagctacagctgccttcagccttttttgtttttttttttttttttgagacggagtctggttctgtcgcccaggctggaggggtttacgccattctcctgcctcagcctcctgagcagctgggactacaggcgcgtgccaccacgcccagctaatttttttgtatttttagtagagatggggtttcaccacgttagccaggatggtctcgatctcctgacctcatgatccgcccgcctcagcctcccaaagtgggaggatcacttgagtccaggag

SEQ ID NO: 57845 - DNA, 2118 bp, Homo Sapiens
acataattttaagtgcttcctgtcaggtctgatatttaattttactttagttagaagctaagtagttaccctgttacttcttcatggatgctaacagaagacttgagattcccagacagaaacaaaggactattactcatggcacaacaaggagcatgagcatcagcacattctcattgcttccccttgtcccaggtcccatgggggcaaaatgatatggccatatgcaatatggctacatatacagcaggcttttgttgtaggtaaagaatactgagcttggagggttcactgctttttatccatgaacagaagcaaacctgctctttgcctcatcccttatagatgctcactcaaaactcaatactgagaaatggcccaggtaaagaacagccaaggtctttcatgcttgccacacccagcaatatgtttaggaaggtgaagtctactgagggctatctcacatctaacagtttctttactaggaccagagaccattttggtaagatgcagataacaaccccaaccttaacaacttcacaacatgaatagaaatagtgataaataattcatagctttttacaaaagaataatgaggtataataggaaaatgttttgatgccaaaaataaaagagttaatgtttggatcggactccaacagggctccttagagtgatacaaatacaaagcaaacgatatgtgtaatttaaaatttcctagtgcacatgtttttttatttttctttttcgagatggagtctttctctgtcgcccaagctggagtgcagtggtacgatctcagctcactgcaacctctgcctcctgaatttaagcgattctcctgcctcagcctcccaagtagctgggattacaggcgtgagccactgcatctggccctgtacgcacatttttaaaaataaaactttaaaaaagaaacagttgaaactaattttaataacattttatttaaccaaatatatcaaaaatattatttcagcatgtaatcagtattttttaaattgaggtatttgttttatcttcaaaattcagtgtatatttttacataatagcacatctcaattcacatgctaaattttcatcagaaatattttatctgtatttaaatttcctaaaatgtacagttgaaaaaaagagattcacatacccaggttgttctagcatgcctaaaaaatcttgtaactggatcaagtatcagtttttaaattagttaaaattaaataaaatttaaaatttagttcctcagtcacactagccatatttcaagtacttgaaggccacaaatggcttgagactacctcgctgaacagaccaaggtcaaacactgagataataatgattcttaaggccatttgaaagttaacagcaagtatgtattactgctatctacagtaagaattacattttatctacaggcaatcataagccatgtctgttatgcagcataggctttccattctctatacatctaggtcatagagtttttccattgataaatctggatgtttatataccaacattactttcttacaacatattccagtatatagtgtccagcttcacccactttttaaagtggccctgaaacaattttattcatcttattggagtgttgctgtaggggaagagtagaagctaagaagagtttgagttcaacaccattatatccaaatcctgaccttactactagaatgtaagctccttgaaagtggagatcttgtctgtcttgttcacagttgtgttcccagccccagaggtagtctcagggccaataccaagtatgctctcaaatatttgctgggaaaatttactagctggataaaaggcaagttactttaatctctttaatcttcctttgtccttacaaatgaaagagactaatagtacttaaccttgcagtgttattataaggattaaagttgataaatatatgatcatgagaacaattgctagcacataacggtcactctgaaaatagtagctgatatatcagctgcattgtttgattattgttggctcaattaaaagttggcttttccaaatcctccattaggaagaatttttaaatagccatattgaaaataaagttgtcagaaaacc

SEQ ID NO: 57846 - DNA, 605 bp, Homo Sapiens
  misc_feature (578)..(578): n is a, c, g, or t
ttttttttttttttttttagagtaatactattgtgttattgcatagaagagacggctttcgggcgctgggctaggtaacggtctgggagcgctggcggctgcctgggggctgctgggcggcgggggctgcactgctgctgagttgtcgctgctgctcttgctccctggcatgctcctcataccactcctggatctcctcctggtacatcttcaggctcaggtcgctcttggtccttgatcgccgtcccagaaacaccatggaatgttgctggtatctctccatctgggagagggtctccagcagcctggtgacatccgaggaggccccccgtgcctcccggtagagctccaggacggcaaccagctcttctttggagatttccttctcaagggtgatgccaccatcaactgcagggatggaaggcaggtgtgggaagggcccggggctgcagctgccaacctggctgggtctcgtacctccttgcccccttccgcagggggtcttaaggttctctctctaaaccgacactgcattggtgtcctgctctcctcgttggccctcctttctcttctcctcnctctgctgtgatgtcaggagcgcaggt

SEQ ID NO: 57847 - DNA, 361 bp, Homo Sapiens
aagtagagacccaggctgatcttgaacaaactcctgggctcaagcaatcctcccaccttggcctcccaaagttctgggaatacaggtgtgagctactgtgaccagcaaagatctctttaaacatgtgtatctgaaaagtaaaaatcaaggcaggctagatttttaagtctgtacaacaaccaggcaggcaatttgggaatgtaggtactcattatggtatacaatagtcaaccaaaacacttttaataccaccaggttctggtctggaaccagatatgtaatctagtcagggatattttttctcagagggaagtgagttgcagttgcagtcttcctttgataattatctacttctaggaca

SEQ ID NO: 57848 - DNA, 825 bp, Homo Sapiens
ctagacagggtctcgctctgttgcacaggctggagtgcagtgacatgatatcagggctcactgcagcctccacctcccaggcccatgtgatcctcccacctcagcctcccaaggaactgggactacagccacacagcaccacacccagctaagttatttttttttttagacacggggtctcactatgttgcccaggctggtctcaaactcctgggttcaagtgatccttccacctcagcatcccaaagtgctgggattacaggcatgagccaccgcatccagccacacatctctttttgaacatggtcattctgaaacctattcagaagtggttaggttatgaccatgcccattttccaacctagggaactgctggcagcttgacagggaagtcacggtgactccagaggttactgcatgtttcatttacgttacatcctgtagtgcttggctttttaaagcaaaagttgtgagctcctcttcatgtgcctccttcccccaaagggctgcacactaccggattaggaaacacgttaagttgctacttgaggggggaccttgacagaagacgtggtacgaacaacgaaaataactgatgagttttattcgggaaaagaaagtgtccctcttgtggatgccatacaaagcagtcttgacttcgaggtgggcacaagccgtagttctttaattatcgatactcttgcaccctaggcaacattcgagaacacgctgtacctgatcacgattcggattctgtgagtgttctagtggcaggagctattgtgagccttacaccatgaacttacgtcaaagcattgcgggggg

SEQ ID NO: 57849 - DNA, 501 bp, Homo Sapiens
ttttttatcttttttatataatgatttatttttctttgggtgtattcccagcaggcagatggctggatcaaatgctagttctagtttcaattctttaaaaaaaaattccacgcagttttccagagaggttgtttttggactgagcaaccgagagggagagtgaccatctcctgatggaggagcagccccacgggtatagaccaggagggggagtgaccatcttctgagggaggagaatcccatgggtatagaccaaggaggggagtgaccatcttctgagggaggagaatcccacaggtatagaccaggaggggagtgaccatctcctgatggaggagcagccccacgggtatagaccaggagggagagtgaccatctcctgatggaggagaatcccacgggtatagaccaggaggggagtgaccacctcctgattgaggagaaccccacgggtatagaccaggaggggagtgactatctccagatggaggagaatcccat

SEQ ID NO: 57850 - DNA, 721 bp, Homo Sapiens
  misc_feature (669)..(669): n is a, c, g, or t
  misc_feature (710)..(710): n is a, c, g, or t
ttttttttttttttttttccgagaccatgtcttgctctgttgcccaggctggagtgcagtggcaagatcccggctcactgcaacctccgcctcccgggcccaagcgcgtctcccgtctcaacctcccaagtagctgcgaccacaggcgcatgccacgacgcctggccaatttttgtatttttagtacagacggggtatcacgatattggtcaggcgggtcttgaactcctgacctcaggtgatctgcccgcctcgacctcccaaagtgttgagattaggcatgagccaccacgcctggcccatttatgatttttaaaaagttatttcttgtcatgtttctccatgcaagttgagaggataaagcaaaagcaatatgcacaatgaatcagcaaagggctcattattaaatgtttactgaatgcctagaatgttaaatagggataataatatttagttactttcctccgagttctaagatggttttctgtgattaaaatataacatttaatttgcatataaaggagaaagaatcgagtagccttagagaactactaaatctttaagatgtcaaattcaattacattctttagaagtgtaatatttcctgaagagaaaaagagctaaatatagactctgggaggaaagatgcaatttatgaattaaacccangagattctcagaaaatcgtgtagccattttaaagttaacanacttgaccttt

SEQ ID NO: 57851 - DNA, 1506 bp, Homo Sapiens
agcgggaggggtggggaagggtgggcccggggtcacacggggtaatggcagagcaaggactagggtcagggtctctggctctcagctgcccatgccacctcctccttctctgccgccccagtgccttatgggtccaaggttgactcctgtccctagggcaggcctgtgggccctgcctgatccctactgggaggatggtacctagggttggagccaaacaagtgtcctcctccagcgccagcctggccctgagtgcgaactcgtcactggtcaggggtccagacagcagcatccctgagggcccagagaggtggccagtcctgtggtgaggttgagaggtgtcaacgtgctggtggtcctcgctcgctctcagcgcctcctcggcctcagcttctgctctgaccacacttgaggagcccttcagcccagcgctgcactgtgggagcccctctctggactggtggaggctggagccggctccgtctgcttgcggggaggtatggagggagaggcgtgtgcgggaacctgggttgctcgcgggccagcaccagttctgggtgggcaggggctcagcgggccctgcactcggagcggccggctggtgcctctggccccaggcagtgaggggcttagcacctgggccagcagctgcagagggggcaccgggtcccccagtactgctggcctgccggcgctcaccacacttgaattgtcgccaggcctcagtcacctccccgcggggcagggctcaggacttgcagcctgccatgcccaagcctccctacggtgggctccctgcgaggcccgagtctcccggatgggtgcctcccactgctccacggcacctggtcccgtccactgcccaagggctgaggagtacaggtgcccggtgtgggactagcaggcagctctgcctgtggccctggcataggatccactaggcgaagctggctgggctcctgagtcaggtggggacttggagaacttttatgtctagccagaggattgtatatgcaccaatcagcactctgtgtctagctccgggttcgtgcatgcaccaattagcactctatctagctaatctggtggggacttggggaacctttatttctagctaaaagattgtaaatacaccaatcagcactctgtgtctagctcaaggtttgtaaacacaccagtcagcaccctgtgtctaactcaaggtttgtaaacgcaccaatcagtgctctctgtctactctatctagctaatctagtggggactgggacaacctttatgtctagctaagggattgtaaatacaccattcagcactctgtgtctagctcaaggtttgtaaatataccaatcagtactctgtgtctagctcagggattgtaaatgcaccaatcagctctctgtaagtggaccaatccactgtctgtaaaatgggccaatcagcaggatgtgggtgggggtcagataagggaataaaagcaggctgcctgaagcaaaaaaaaaaaaaaaa

SEQ ID NO: 57852 - DNA, 710 bp, Homo Sapiens
ttttttttttttttttttgatggagtctcgctgtcgcccaggctggagtgcagtggcgagtagctgggattacaggcgcctgccactatgcccggtttttttttttgttgttgttgttgtatttttagtagagacggggtttcgccgtgttagccaggatggtctggatctcctgacctcgtgatccgcctgcctcggcctcccaaagtgctgggattacaggcgtgagccaccacacctggctattcttttaatattcttacaaattcaaggtgctaggtaagatcacaaatctaattcaaaagtggtactacgctgtttttgggggtagagggagttaatttgataaaatgaatcaaaaataagattttcaataaatagtatatgatactccattacaagtatgtgcacaagcagataaaattacaaattctaccattcctggggttggaattcagattatttttaacctatagtttttgcaattgttaataactaagaattaattattctaataaacaattcattcaacttctgaagctgctgaacaaatttgactacagagtttcgtctcacccgccatgttcacctgacctctcgccaaccaggtaccacttcaagcatctgacaactttttacagggaaggtgcttccacaaccagcaggatgcagaaaatattttccaagagtttgtcgaatcctgaagcata

SEQ ID NO: 57853 - DNA, 785 bp, Homo Sapiens
ttttttttttttttttttaatgctttttgcacaatacttacgatttaaaaaattacatgatggcttctttttcatcatttaagaagtgaacaaaaagtactggtcaacttttaaaatatgagtggtatgaacacaatgcaggaaagagactaaagttgaagaatttcttttcatcaggccacccaagtattgcaaaccagaaaaaaattttaatataaactgttgcaatccttacatctttatgcaatttatttggaaaagtcaaataattccattacaaatatatttgttaaaaaccttataaatttaacttataaattccaaattagtcaattatattatttcagagtctgagatatctagatgagtgatactatatatatcacacacagatgaacaattttctactaattataaaagagcaaaaatgcttaatacaaagctatactgaacataatttacggttaattgctcaagtggtacttgaggattttcctgaacctcagtgtcatcattagaaaactcactatctcttcactgctatgtgtggaaacattaatcaaggatgccagttaagacagagctattacatagagattcaccctactacttcaacgaagggaatctgtcatattatacgtccctcttaatttatcctgccataaacctcttgctaggaactgatgcatttctagaacagcatttctagtctcactgaaaccagggtaccacttctgtatctacacacttacgttaaaataaacagtgcattcatgcacatgaat

SEQ ID NO: 57854 - DNA, 363 bp, Homo Sapiens
ttttgtttttttttgtttttttctttttgtttttttttttttaaagaaacctaccttaaggtgttggcaaaaaataaataaataaataaataatttcttttacatgctgaacgatcttctgtttatctggaaaatttattttaacaaatatatagacaaagaaaagtattataacactgcactaaaactcagactaagacttaactaaatgtagacacctagattgagttattaaagatgcatttttagtctacaccatctagcttatgtgtctttttgtagtctcaagggtgatactggatacttttctaaaatattccacatgtgtaatagcaaccacaggcttaacaaaaacagtcaaag

SEQ ID NO: 57855 - DNA, 332 bp, Homo Sapiens
tttgtgttttcatttttaatttttgaactgttagaaccaaccacagtatcagcctcacagtagcatgtaatccatatttattaaactgtactaaatccaactaacacaatgaggcaaataactagataggaggagggggagacactaaagaagtgggaggtcccaagacgaagggtggtagcacaccattcatcaagaaaggcaatacagcagcaacagtaagcaactttgggaaaaggatagtaaaagttcaatatttgacaaggtgagcaatctgtaggatataaaagtagatttccagtagacatttggaaataaggacctagagtgga

SEQ ID NO: 57856 - DNA, 439 bp, Homo Sapiens
ctttttttttttttttgagacggagtctcactctgtcacccctgctggactgcagtggcactatctcggctcattataacaacctcggcctcccaggttcaaacgattctcccgcctcagcctcctcagtagccgggactacgggcgcctgccaccacgcccggccaattttttgcatttttagtagagatggtgtttcaccatgttagccaggatggtcatctcctgacctcgtgatccgcccgcctcggcctcccaaaatgctgggattacaggcgtgacccaccatgcccagcctggatatttaaattgttctgtgctctcctccttttttttctctctgtgattctctttgtcagctcctttgcctatatttgcatctcagttgacacccctgattctgacttgtccttatcttcctaccagtctctgccgaccg

SEQ ID NO: 57857 - DNA, 2267 bp, Homo Sapiens
agcggggaatctggcgcggcctttgtctcacttcagccagagcgcggggttaggggttcattgccttgtgtcctctgctccgggagacttcggtgattctgccactcactccgtcgctctgtgacctgctggcattgaatgatttatagctaagactccaggacacccctgaagccgagaaatgtggaaaagcgagattgtctttgaccatttgctatggacattgtcagggatggtgcagcctgaatgagaatgtctgcggtatttcccgaaataagtatccctcaaggatgatactgtggacctcactcaggaagaatgtgtccttcagggaaagctgcacagagacgtgatgctggagaagcagtcatctggttactttaggtttgtgccccaggaagtagtgtgttgatttgaagccctaaaaaaaatattttccgcactcaagagtgacttatccagaccgattttacctaagaaacaagcctgaaggaggagagagaagaaagaagagtcagaactagcactttcccagcatgaatgagagatcctttcgcttcacgtctttgccagcatttggtgttgtcagtgttctagattttggccattatagtacatgacttcaggctcctatgtgcagaagtcctcaacccccaggctgcagaccagtacctgtccatggcctgttaggaaactggccgcacagcaggaggtgaaatgattattgcagtttcgaggggagatgatgtcacaagatctcgaacccatatctcagaaccgcctgcctcctcccacacactctggctgtcctgaccatcacttcaagcccaccagccctgcagcaaaaaaaatcaaacgagtagttcagaaggcaaagtctgcaagggaaggaagtatattgggaggtacagtaagtattcctgtctggagaaggtcttctttggggctagaaactgagccagtgctaaagccatgcaggaaggaggaaataatcagtgagccacgggctgaacttgtggaaaagaaatggagggcaaggtcacaaaccagtccctaactgcttctaatttaatgtaatcctcactgtttgtcattattgcttttgatggccatgaaatctgttttttcccagttctctagtgtaatttggaattaatttcccagctgctttattttttttctagaagagtcggggacattttcaggattagtagaggtgtttctacaacaccttcatgccttcgatagtgtgtaagagttcaccaattgaattaccttattctgttcagaagtagtaactatggagtttaaccactctggacatattatatacttaatggagaccatagctgtgtggtgactgaaaacatgcattgtctactccttatggtgagactgctttccttcatgaagtcagtaaagaagggtaacttttctgtagatttttgtatttttaaaaaaggtcaagatcttcggcagttttctgaattgaattgtttgtgatatttgctctgtttttaaaatcttctaaggccattaccaggttcagtgcttatcttagtacaatttaaattgattccgtgaataatttttcctgcctccagtttcccttttacatagtgggctcatgttttaatatgttaaacaattctgacattgaaataattttattttatatttttgcatccacaaatactaattttctccatatattaatggtgatgtagtttctcctctgcaatattttattgcctactcatgttttatgtcccctggattacagcactgtcattccactgtgccctatttcttggttatgatgaaaagactcttaattccagtatgaaatcatttctgcattccataaatttcatttggcatctgtggaattaaggcatcttcattgtatttggatctctgaatcataagtgatatttgcctataaattaagcaatgatatttaaataagagattaccacaatcatattttataaatatacaaccatttttaaaaacctgacaaaatctacaaaaaaaagaaaatgaaatatatgtggagttttagaaaagactgactaggtccaaggttgaggcacatagtggttaagcacattgtcagctccggactctgcctcttacaaggaaggagggggctttagatgttatttagctgttatttagcctttctacacctaagttcccctcacctgtaaaaaaaaaaataataataaattgcttactttgtagaaccaaaaaaaaaaaaaaaa

SEQ ID NO: 57858 - DNA, 1721 bp, Homo Sapiens
accatcatgttaccatattcttgccaaaaaaaaaaaaaaaaaaaaaaaaacaccagagtcgttacatgaagtatctttgatcactgaatttccagcacttctttgttgtgtctagatgctaagcccttttctaatttgaaaaaaaaaaaaaaacaaaaaactggagacctgattctgtttatctcttgtagtttctcttatctctgtttctaaccactctatgtagtgcctctttttttctgtctacacacacacggagcatccaccataccaataatcacagtatgtggtaatgaaaagtggaagggaaaaatggcccttgcttctcacagacaaactcactatctcaatggatcatttttgtttttttgttttgttttgtttttgagacagtctcactctgttgcgcaggctggagtgcagtagtgcaatcttagctcactacaacctctgcccccgggttcaagcaattctcctgcctcagcctcctgagtagctgggattacggcacctgccaccatgccctgctaatttttgtttttttagtagagatagggtttcaccatgttggccaggctggtctcgaactcctgacctcaagtgatctgcccgcctcggcctcccaaagtgctgaaattacaggcatgagccacagcgccccgcctcaatggatcctgatgagctacgcaaaccattatttttatgtctttacgaatgccaccagaaagtttcattttgttctttctgaaaacaaccatgattataagatgtcttctgaaacacggaagtgagagaacatgttgtacagagaagcatgcatccctctgccctgccaccactgcacctatgctaagcatattatagacagaaggatgtccatctgcctatgtaagctcttgcccgtttattcttgggctctgtccaggctgtgaccctattactcctttgctccttcatttgaggactatgactgtgaactgtatttcttcctctctgcacctatataggctacaggaggaagtaacaaaaatcttcccccacacccagagctaaatattttttgccccaagctgaaagttctctagtgaaaatgcagttcaaggccatagatgcaggagagaagtagatttgttggcttctaaaaggaatatctatacagatttgtctaacagcaccatcctaacagcattctgatttgttttattttccatttttaatacctttgttgatgtgtaatttacatacagtaaactacacacttaatgtatacaatattataagtttttatgtacatgtgtactcgagaaaccatcaccactatcaagataataaacatccatcaccccttggagaaatcacgttgcaatccctctcttgtgcccctacctacattctccgttctaaggaactgctgatcttctttctgtctctgtagattagtttgcattttctagaattttatataaatggagccatataatatgtactctttttttggtctggattctttccatcaacataattatcttgagatttatccattttttgcatgtttcaatagtttatgcctttttattgctcaacagtattccattgtatgtatataccacagactgtttatccatttgcctgtagatggatatttgggttgtttctagttttgttgttgttgttgttgttgttgttaccaataaagctgctgtgaacatttggcaccagtc

SEQ ID NO: 57859 - DNA, 688 bp, Homo Sapiens
ttttttttttttttttttaatagctacaaatgtatttttctttttttaaaaaatattctttatttcttctaaaaaaaaaagggggggggatacatctgcagaatgtgcaggtttgtttcctaggcacatgtgtgccacgatggcttgctgcacctattggcccgtcctctaagttccctcccctcacccaaattcaagttttgtttttttttttgagacggagtcttgctcagtcgcccaggctggagtgcagtggcgcgatctccgctcactgcaagctccacctcccgggttcacgccattctcctgcctcagactcccgagtagctgggactacaggcgcccgccaccacgcccggctaatttttttttgtatttttagtacagactgggcttcaccgtgttagccaggatggtcgcgatctcctgaccttgtgatccacctgcctcagcctcccaaagtgctgggattacaggtgtgagccatcacgcccggcccccaattcaagttttaatgaagaagaagtggttcagcagctcagaagagccaccaaacctgagaagctgtcacttacccagctgactctctggtcctaggaagggtctgcaagaaaagcaacaccattacccagcacggaccaatgaaaaaagcatgacacatctgaacagtcagctctgaaacgcagca

SEQ ID NO: 57860 - DNA, 718 bp, Homo Sapiens
ttttttttttttttgtttatagcatctttattcataatcaacaaaacttggaagcaattaaggtgtccttcagtaggtgaatggataaataagtcatggtacttccagacaatagcatattattcaatgagaaaaaaaaaaaaaaaagagctagcaagctacgaaaagacatggaagaaacttaaatccacattactaagtgaaacaaatcaatctgaaaaggctgcatactttatggttcagaggcaaaattatggagacaaaagaaaatagccaggagtttagaggagtaggcgaaacacagaggattattgggacagtgaaacggctctttatccttctgtaataatgcatacatgtcattattcatttgtctcaacccacagaatgcacatcaagactgaaccctaattaaaccatggactttggccgatagtgtcaatgtagtttcatcaattgtaacaaatgtaccactctgaagggggatgttgatgatgggggaggctgtgtatatgtgagggtaggggatatatgggaaatctctgtaccttctgccccattttgctgtgaacctaaaatttctctaaaaactagtcttttatataaatgggcatacatatacatatatatgtcagcactaaaatatcacgttacaataaatataaaggagaaattattgaaagtcatgtacagtgaaatgtgttttcctccatatttc

SEQ ID NO: 57861 - DNA, 260 bp, Homo Sapiens
ctctgcaaaggggcaattattcctggataaggcaagataattgtggtcacaagagaagcagccaaatgcagatctgttgagctaacagggggagtgtctcagtcagtctttcccagctttgcaatcagctcatcacagatttttgtcagttcttcaatttcttggttctgaaagacaaatgacataattatgcaggccactttgtattctgaaataaaggcaaatagagttaactagtcccaagtctggatctaccctac

SEQ ID NO: 57862 - DNA, 631 bp, Homo Sapiens
  misc_feature (537)..(537): n is a, c, g, or t
  misc_feature (603)..(603): n is a, c, g, or t
  misc_feature (613)..(613): n is a, c, g, or t
  misc_feature (620)..(620): n is a, c, g, or t
tgcattccttacaatttctatacatagtgtcttgtattcttgagaataaagacttttatttcttcacttccaatctgtatagctttaatttccttttattgccttctctgggtagaaactttaatgcaacgttgaataacagtggtgagagccataagcctttacaaattttttttaaaattcagaatcctgagaacctctagccctatatgttttgagtaaggctttgcagacccacagtaagctactaataggattgttgaaagggtaaaatgaagtacaacatataatgtgcttagtgtaatgtctagcaacagtcagtcctcataaaatactagctttcagaaagagaatcttgactggccactggcaggccagcatcagggatcagaacttaacactggggactgaggcctgggtgggcagaggctgggctggctccgtggctgatgtggtgggggatggaagttccctgtggcttgtctccagcatgagtcagcacaatgtttgtcagcctccccagggatttttggtgcngtgggagcccaccaagccaggatgcttgtggttatagagaacatatgtaatgtgaagcgagtgacnccggatgacncatggantgaagtccatg

SEQ ID NO: 57863 - DNA, 447 bp, Homo Sapiens
  misc_feature (200)..(200): n is a, c, g, or t
  misc_feature (214)..(214): n is a, c, g, or t
  misc_feature (216)..(216): n is a, c, g, or t
  misc_feature (295)..(295): n is a, c, g, or t
  misc_feature (356)..(356): n is a, c, g, or t
  misc_feature (368)..(368): n is a, c, g, or t
  misc_feature (398)..(398): n is a, c, g, or t
tgcaacggggtctcattctgtcacccaggctggagtgcagtgatgcaatcatagctcattgcagcttcgatgtgccggggctatgatctttgatgtgcacatttttttttttttttttttttgctcttgctgaccaggctggagtgcaatggcacctcagcttcccaaagtagctggaactacagtcacatgccaccatngcctggctgattantnttatttaagtagagataaggtcaactatgttgcccaggctggtctcgaactcaaactcaagcaattctacctgccttgnctcccaaagtgctggaattgtaggtgtgagtcaccgcgcctggccctggcagaaacgtttnctttttcatctntgtatgcaatcatctctgtatcccctacangccactttgatcaacatttgctgaatgggaatggatttggttccaggtt

SEQ ID NO: 57864 - DNA, 626 bp, Homo Sapiens
ttttttttttttttttttaagaaaaaatacttagaatatatccctttcagaaaagctagtaactcctgtaactctagtttacataagtcatatatttttagctgtttgtttactcatcctgagacaccacgctgaaatatctagatggcctggtctgttgggatgtagggcttttaaaaataccagtattaacattcagattatagattatgagaaatgactcaaaggatcactttgcaaatgagaaataactcgatagatttcactttgtagactttccaagaatagttccacatatgtctgtacgctcaaaactaatactgggttgtataagtccctgtacttcaatgaaactaattcttaaattaaaatttctcaattattcctggctcccacagaccagaacatatggataaatccataggcaaaaaacaagcttctattttaatcaagggttatagcttcctctaccaccacctttaactgctgttccctagaaagaaaacagtactaaatattgcgtttcttcatttctttgggccaccttctcattgggatactaacagataataaaatatcaaaatgtgtaaggaagaaagatttgcagtaattccctcgtgccgaat

SEQ ID NO: 57865 - DNA, 758 bp, Homo Sapiens
  misc_feature (714)..(714): n is a, c, g, or t
ttttttttttttttttttgtaaagaccaggtttcgccatgctggccaggctggtctcaaactctgaaactcctgacctcaagtgatccacccgcctcggcctcccaaagtgctgggattacaggtgtgagccaccatgcccagcctaatcttgcattttttaagggccttttcttggggctctcaatgcatacctgtgtaagtggaaaattcctgcgtgaacttgttttacatttccagtacagctaacagacgacaaaactgactctaagtagagacaagcaaagtcttgaatctctatagtattctcaaataaggtcctgaaacaacaggcttttatgttaaattcaatacttctgagcaaggcacgtacagtatcattgatttgtaagcaggtaaagcacagtacctttccttgtttcctagaattcctaaggaggaacaacaacaaaatcggggtttgttcagcaattgcaccacatctctaaaaattaaaacattattcagtaagtgaaggtttctgataaacaagtggatcaaactgaatatttccaattaagaaagttcacaataatacagtagtgtattattaccaataggaaggcctaatagtcgactattattttttaaggcaagaaaaaagaaaacaagtgcaagctatgccaagcttttggtgaatgctgtccttggcattgcaagtataaagtttgtttanaaagaaaagggaaaaattaaactaatgcttcaacaaccacagaa

SEQ ID NO: 57866 - DNA, 3170 bp, Homo Sapiens
gtgcttcgcctaggggaggaaaactgtcatcggagagttctgcgtccgggtttgaaatttacatcttaagacagtgtaggaagtcggtgttttgaaggtagctcaagtgcaccggcaggggtttgaagcagcgtgaagctattgcccaagagtaaaccatataagaagaaatgagcctttcattttgtggtaacaacatttcttcatataatatcaacgatggtgtactacaaaattcctgctttgtggatgccctcaacctggtccctcatgtctttctgttgtttatcacttttccaatattgtttattgggtgggggagccaaagctcaaaagtacaaattcaccacaacacatggcttcattttccgggacataacctgagatggattcttacattcgctctcctgtttgtgcatgtctgtgaaatagcagaaggcattgtttcagactcgcggcgggaatcaaggcacctccacctctttatgccagccgtgatgggattcgttgccactacaacatcgatagtgtattatcataatatcgaaacatcaaattttcctaaattacttttagttccaggtgtttctgtctctggcttggagtccaaggacattttcccaaggttcaagcctttcactgatgctgtgggaatgccacattttactagaattactatgtagcagagtatgtttctagcataatgaaaagtatgctgtcctgaggagcagctgccattacatcacggcctttcgcacctgcattgtgactaaaattgttttattagcctctcttgcttccttgttctgtggaaatcagaggctctctaaaatattcctaattttatttttgccttgggtcaaaattatataacgcatctatatgagttatgttcaatactctgacccatcactgtattccttggagtatactttctttcttaaagagataaaggtatggaacaagaatcacagatgggctatgaacctcctgaaattgtagttcgaattatgtgtttgtgtgaatgatgcttactgtttctgattttatttgattgttgtataatgaaaatgatgttggctaatgatatagaaattaggagaagaaatattgaaaacacacacacagtattttattcatttgtccagaggacatgaaaatttaaaatggatgcatgaaagatattgattatttaattatatgttgtgtcacattatatgattgttaaaggcaatctaataaaaaaggtagagagggttaaatattaatttaaaaggctgtcacattttgaattatcttaatagaaaggtcttttgtgcaaaatgagaggcagacattattgcagaaaatgccaaaaaaagagaaagaaatttccaacaagtagctgcaaaaaaatatgtgaaattgagaatttaataagctaaatatctatttttgaaaagttgatggtaaaaagaaaggttataactagaaaggaatttagatattaataatgttttgatggaaatgcaatcagaagaggcctattattgttatttaggtgcaagacagcacaatttgatcatattgctggaaggacatggagataaaatataatatttcttgttattttaacagagaaaaatttggacctaggaaagttactcattttaagaccacaaagatagtaattttgtctcaacatttcattatgaaaatcaccaaatgtacagaaagttgaaagaatcatgtgaattcccacttacccaacatctgaattcttcaaattacattttttctgtttgttttatcacatatctacatcttttcatccttctattcatacctctctccatcttagttttgatgcattttaaggtaagttgtagacattagtatactttacctctgaacgcttcatgcgtatctttttgtgagacaaaatttatatacatgaaacacagcgatcttaatttgctaaatgcatgtacctatataacactatcatgacataactatcatccatgcaaattttcttatactcaatttcacctttacagaagcaatatctgttctgatttttacccccaccatggattaggtttgcctgttctagaacttcatgtaaattgaatgacacagtatagacttttaagtaaggcttctttttctaagcatgattttttgatgctcatccgtaatgtagcatagatcaatattttcttattgttgcatttcattgtataactatatcatagttttttcaatcccttgttaatagacatctgtactatttccaggttttagccatcatgagagtaaaagctgctatcaacattcttaagtattttgtggctatatgcatttatttctcctaggtaaatacctaagagtgaaatctctgggtcatacaataagtgggtaaatgttcatattttaagaaactgacatcttttcccaaaatgtttgtatcattttttatactcactaacaaggtgtaagagttccagttccacatgttcatcatttggtgatcttggtctaatttagtcatgctagtgggtgtgtactggtaatacattgcggttttaatttgcatttatctgattgctaattatgttgaacactctttgatgagtttattggccatttttaatctttgggatgtggctattcatatcttttgcccatgtttcattgggttgcacttttattattgcgttgtaggaatattttgtgcatactagatattagtatgtcatcagttacatgttttgataatgttttccttctagtctgtggcatacatattcatttatttaatagggtcttttaatgagcagaagattttaaatttcgatgtagtataatttatcatttcttctagtccttagttactgctttctgtgtcttaagacatctttgtcttccctctaaatatgtttccctcttattctcctgtttgcttttagatgctttatggtttccatttttatttttaggactacgattctttctaaattaattgtgtatatggtgtaagataggtgtcaaagttctttttttttttttttttttccaagtggatatcaatgtgttccagcaccatttgtgggatagactttctgtttctcaagagattgcattggcacttatgtaaaaaaaaataaatcaaatgactatttaaattt

SEQ ID NO: 57867 - DNA, 1927 bp, Homo Sapiens
gttccctgaacatcataaaatgatcctcgaccgattgaatgaacagcgagagcaggaccggtttactgacatcaccctaattgtcgacggacaccattttaaggctcacaaggctgttttggctgcttgtagtaagttcttctacaaattctttcaggagtttacccaagaaccattggtggagatagaaggtaaatgattcttgttgtttttttatttaataaatcaaagaagccattttatttaaatgcttgttttaaatacaatacttagcaaacaattggtgaagcagttttagacagtttatcaagacaccataggaaataggcatcagtagttcctgtaggtaaaggtagataaattgttcttttgatacctgagaagtcttactttcagtgaagcgcttggttgaatgatctgccaggaaaaacttagatggtagatgttggtcttttccattgtggaaactggtggtcattgttttttgaaaacaagtattaaacgtgaattactatctttgttcagtgggcttatgtttcagactgctggagatgctgcaggttacagtagaagcttttactgtactctatagcagaagtagtgatgtattagcagaggtacagatgacatgcagtgtgaagtgggctgccataatagggggaaagctaggaaaaatgaactgaagtagcatttagaggaaattctggctctacaatgggatggatcaatacctgttaccttgaagcaaaaagtgatttttgtactttctagacatttttctaataataacctgccaagtgccaggcgttgtgatatgtagttttgtgtattgtctaaggctcacagcaatcgtttgatgttgggcaggatggcttgtgcttgtagtcccagctactcgggaggctgaggcaggaggattgcttgagcccaggagttcgaggccagcctggggcaacatagaccctgtcttttcttttcttttcttttcttttcaaaaagggaagtggtgttatttgtaataatttacacttcaggaagcaggctctaaaaggttacttgcccagggttgtccaactagcaaggaattaagtttgtgctattaattaccatgctttttcttctgctactgcagtaactcctcccctaccaccagcatcaaaatctaaaacagcaggaaataaatgtttgcctacgtaattacagaattttagcttcttttagggttcttgggttttggttttatatctatttcattgtgtacgtattctttgttctgaatgggttgcctagaaactccttttttccctttgatgcctaggggagtaaagaaaacaaaaaagagttaagaatattctttaattttggtatattccagtttatcattatagctgatatatttacagctagagtatcttttaatatctataatcaggacagagacataattatgaaaatccacaaaacttgataaagtgagaatctaactgcccagatgatagtggtttctactacaaagcaagcctccatgaattcattcacacctgaggtttattaaatatgtgaccccaggcgggttactttacctcaattgcatacttttctcctcatctgaaaagtgggttcataggattataaagactaattgcgataacatgcagagtgcatggcatgatatttggtgccttgtcaaagcttgataaacagggtccagtctaagaaacattagggagacctcttctctacaaaaaatttaaaaaattattagctgagtctgatggcacatgcctgtggtcccagctattcaggaggctgaggcgggaggattgctggggcccaggaggtcaaagctgcagtgagccatgattttgccactgcattgtagcctgggcgacagagcaaggccctgtctcaaaaaaaaaaaaaaaaa

SEQ ID NO: 57868 - DNA, 455 bp, Homo Sapiens
ttttttttttttttttttaaccaagtttgaatttttttaaaccaacatacatgtattgctttttcagtaaaaatataacttttacacacaaaaaaaacctccagcaaaacgtatccagagatgcctcttcctagatctcaggtatcagactccctgggttgggaggggaggcaggacccaggcacacagattttgaaatgtctcctcaagggctgctggtctagccttgcagaacaggcagtcagcctctgagagtagactgaggaagcctggacactgtggggctctggggtgtggaggagagtgccagggaagactgtgggaaaacttgactttgaggcataggaaggatttgaagaaggctttgaatgctgaccatgtacagctgggatgagagggttcctacaggaaggacgggaaattaagtgaaactgataagggaggggaaggggaag

SEQ ID NO: 57869 - DNA, 386 bp, Homo Sapiens
gctcaaacaaaaagaaaaagatgaagagaatgagaaggaaaatgagaagaaaagttatctacaaaaaattatatatgcatgatgcctagagttcatatattggtaatttcatttttaacggtgcagctgttattcagatttttgttttacttcagtactgaacacaaaaataaaaaaactttccaaacggaaataatgtttcgttgtgttttttctcagcctgtctgagaaacattctaaacattctttgtgactacctattcattcattcattcattcagcagtcagcaagcatagagcagattttgtaagccaagaacagtgccatgctgaacgctgcagagacaaaagatgaataggacactggctctggtcttagagggtgg

SEQ ID NO: 57870 - DNA, 435 bp, Homo Sapiens
  misc_feature (308)..(308): n is a, c, g, or t
  misc_feature (349)..(349): n is a, c, g, or t
  misc_feature (375)..(375): n is a, c, g, or t
  misc_feature (383)..(383): n is a, c, g, or t
  misc_feature (393)..(393): n is a, c, g, or t
  misc_feature (402)..(402): n is a, c, g, or t
  misc_feature (422)..(422): n is a, c, g, or t
  misc_feature (427)..(427): n is a, c, g, or t
ttttttttttttttttttggctaagccctatatggagctgggagatgtaaagacatataatgtcccagggatgcaatcgcacctgccccaagaaggcatgcacctcaaccaactttctcaactttgcctatcatgcttcgatctaaatcaaattgtgtttgtttcacagggtggaaatagaggacttgtgtgaggaggtgccactgtgattgagtcaacaatggagcaaatgaagcgctaaaagggtaatagcattttcctcaaattatacgatcatcattgggaaacccaggcattttgacaaagtnttcaaacatcaggggattgggagttagtatcacgtagttgnggagccctggttttggggccttacantctgattntctgaaaagncctttttantgagggtgggagtgattttnccttncctttctt

SEQ ID NO: 57871 - DNA, 1868 bp, Homo Sapiens
attataaagattctgaacaacccaagagcatatacgttgcccatatccaaggaagaatcaagattatcaagactagcaacaaagactccaagcaaaggctaccaagaaacctcatgaagtgaaacaggactttgagaagttcctacataaactgcgttccgaagctgaaattgagagagaatgtgtggcatcactatcgtcatcatcatcatcatcaccatcatcaacagacaactacaactttgaggaagaagaatactaagagaaaccagaaatgaactctattcaagaataatgcatacaattcagtggtatcagtttaattgtaacaatatatttaattcaagtccaatccatgtaatcagtattaagagtgtgttttaccattcatctttaaaatcttcaaatcaataaatctcagtaagttattcttaaaagatctgtccaagcatgatcttggctcttaatagtaaaaccatattttaagatggaaaaagaatcattatgaagcatagagagctttcaaccatttctttgaaaatatatcttgatataatagcaaccgttcatcataatacaaaacagaaggaagattaatttactgtggcacagaaagtcctgccaattcctaagtgccccaagtagtttctctcagactttttacattttttcaggcctcaagcaaaaccaaagccccacctccaggtttggtagcaaacaaactttgcttctccggtgctaagcttccatcactcctctggtaataagctttgtgcacatttgctagaaagctgggcagcttgtccgcaggtaccattgatactgtgcagcctccccatcctgctccagtaagtcgtgacccttgagccccaaacttcctaaaacagtgaggaaaaaaatattagaacctataaatgaaaatacaagggatttgcttggtgtttgtagaacacatagcctatctaagttctaagaagaaaatacatgcggggtttttaggtgtcatcaaacattttaggacattaagacatttatactgtttcagagagtgatttggaattttttcattgtatctaaatctagtccctggttttgactccaagtggtaagtcaacagtactcctcccatttcatgactggcaataacccactgtaatattgattccataaagtagccacttgaagagttgtatagcaagcttacacgtaaatcaggaaggaggcgttaagataaaacaggcaatggtaaaagaaatgtaggcaaccctgaatcagaaggtcactccaaatgaggacaaatcaaaatttaaaatgtacagtcttatacaagttttccccaatggctatttcagctgcattcttaaggccgggctgtttcaaagaagaatcagtcccctagaacagatagcctagttcactgaataaacttatcaacaaaaagcttgttattaaactccaggttgggtcggtggttggttgaatctctaatggaaaattaaccaagcctttccacaaagcagagggcagtccctagaggtccacaccaccttccctgtgccttctggagctagtctgattattggactcagaagttgacatcagatgagatatatctgattgggatgataacaactatataaaggaccacacagctagagttaattttagttactgtaaaccaggcacagtttcaaacctaagatttcaaccaaagtgaaaggccctatcacaatgtacacagatcacttagctttaaaagatgcaatttatcctgacacgaaagttaacatgtacttacaattaattcttcttaataaaattcactccaaattactagtggattaaaggctctatgattaatttagcac

SEQ ID NO: 57872 - DNA, 697 bp, Homo Sapiens
  misc_feature (63)..(63): n is a, c, g, or t
  misc_feature (549)..(549): n is a, c, g, or t
  misc_feature (618)..(618): n is a, c, g, or t
ttttttttttttttttgtcaaagtcactatttgggccctaacataatcctgctcagagcgacnggaaaaaaggcaagccttttcaaacataactctctctacaagccagctattatggcaagggaaaaaagaaagcatctagataaatatctatcaaaattaactttaagagaaatactctctttccttaaaagcccttattttttaagacactagaaaataagttactataaaaagtggtggtctgggggctaaaaacaaaacaaaaaaaatcctcttttctacattttttagttttctggcatatttttgaagattttacagtcccaaatgagtcaaatgcctatttgttttttgaataaacaatggacttgtcatgtgatatatgtttctaaacttaagtattacagaaaacatcactatccatttgtaaaaaactcattctggaaaatacctttcccttgtgtttgctataaaataactttccatagagctttttggtaattttgacatgaaaaaacaacagcattcatttatttcccacttcanaatcaatggcccagaacttaaaacatatttttacaaagatgttaaacttactacatcaggtaatagcanaaggatactaaataatagcagttctaacctaactcctgttgtatgagtacgcaattattccagctgacagctgtgaaga

SEQ ID NO: 57873 - DNA, 614 bp, Homo Sapiens
  misc_feature (580)..(580): n is a, c, g, or t
ttttttttttttttttttgacaattcaaaactctttcatgataaaaacttaaaaattagcaacagtaggaaactaccagaacataataaaagccatatatgaaacatgtaccgctgacatcatactcaatggtgacagactgaaagctctcctccaagatcaggaacgagatcagaatgcaggtttttgccacttctattcaatgtagtactagaaattctagctggagcaattaggcaaaaaaagaaaaaaaggcattcacattggaaaggacaaagtatcaataaaattgacagaggtaatcaacaagttcaacaaagtagcatgatacaaaatcaacacaaaaatcagttgtgtgtttatacactaacaatgaacaattggaaaagaaatttaaaattccatttaaaatagcatcaaaaagaataaaatacttagaaattaatcactgaggcaaagacttgtataatgaaaaccacaaaacattgctgaaagagatgaaagaaaacaaatggaacaatatcccatgttcatggattagaagacttaataatgttaacatttcgatactatcctacanattcagtgcaatccctgtaaaaaaaaaaaagcct

SEQ ID NO: 57874 - DNA, 481 bp, Homo Sapiens
tcccagggattaatgaatgattcatcacaattgttttatttctgttcgtagggttttctctcctacaccttaataaagccaaagtttatttactattaaagttacaatgaagtacttatgaaagcatacaaatttgtaaaacaagtccttatgttttcaagaaaattaccagatataatattaacgacaagatgaaacaaagatacgaatcatgacttttgtcctgttttaaagtcaccttatggaacaatacatcatgaaatcaatagttgtacatctaggaaatttaccactggagctctcttccactggtgtggatattctaattggtctcaggtggccgtctctgccattttggtgattggctagaatccaagggtgtttttgaagatggcacctggaattcacaaaacatggctaattcttctgagaagagatgggacacacacatgagagaggagtcgtaaaaacgtcaggcatc

SEQ ID NO: 57875 - DNA, 958 bp, Homo Sapiens
cctatacaaaacaagctaccagcagagcccactgggaatggtcatgatataatcaggaatgttatattcacacgttgtagatctgcatatgagaggagggtttgcagatagcagattctagaaaagttgtctaatcagacagtaaatgaaggtgttgaagcactgaacaaaaataagctgctttaattactcataagagggaagtacaagtcattattccatctgccaatttacagactgtaagataccctttaaaagtagcagtaagtaaactcttcataaaagttagactgtatgacaaatccactgcctttcttcttttgcagcagggcctttctttttaatgactattttttgtttttggagatgaagtctgtcacccaggctggagttcagtggcctgattgatcactgcagcctcgacctccagctcacataatcctcctgcttcagcctcctgagtagctgggactacgggtgtgtgccaccatgcctggctttttaaaaaaaaaaattttgggagttggtgtctcgctatgttgcccaagctgatgtcaaacttctggattcaagcacttctgcccaaagtgctaggattatagggtgtgagccactgtgcccaagctagtgactgtttttgaaaaaaagaagcacattaccctcccttgttaatcacttatgtacaaaaatgcatgttttgctgttgatctgttttaactctttctacataaataacacatttgtacatgtatatgtgcagatatatttataatgttaaaattgtgtttaagtgatgtttactaaacaggataaaattttgtttggaaaattgcgatgtgaaattttatctagttaatctatagtcctttcccttatggtgtccagctctatgcaggctctgcctcactccagattatgtaaatatcaattcatattcaaatgaatttgaaatttagct

SEQ ID NO: 57876 - DNA, 575 bp, Homo Sapiens
gacaaaggagcggaggagcagtcgcagctgctttccgaggaagccggtgttgccgagattgccaaaatgctttggagtttttaactgaatctaagaaaagtccaaaatagatttgagactgtaaaaacagaaactgcagcaagggggattcagtgccaatgcatcaacaaaaaagacaaccagagttagtggaaggaaatcttcctgttttcgtgttccccacggagctcatattttatgcagatgatcagtcaacacataagcaagtgttgacactgtacaatccctatgagtttgccttaaagttcaaaggtgagtctcctagctctattttctgggtttttaactggtccctactaattttttacttgtagaaactaattaaaaaaaaaaaacactaatggccattgtgactttttctttcagttttgtgtactactccaaataagtatgttgtcgttgatgctgcaggtgcagtaaagcctcagtgttgtgtggatatgtaagtcaagatcaattcctggtaacacgttttaagtgtgttaatatttatgtttttaacttgaaaaaaaaaa

SEQ ID NO: 57877 - DNA, 700 bp, Homo Sapiens
ttttttttttttttttttaaatgactattttatttacacaccctattcataaataattgaatcctctttttgactgcacaatgattccttgaagatagcctaatgattacactgagtgactacaagtagatcagtgggcttacccatctgtgtgtgaccaccttctcacatctgtactcacacacacactcacacagacacacatatacacaccagcggggcgggaaccccggggcctccgggactctcaaagcaccagcatttggctcccagcatcagtaggggggctcctgtgggaaaactttgccctgtacagaggtgtgaatttgcaaatattttaattcacagaaactcaaggagagggtgggggtgggggctggggtggtgtgttgccgcccttctgtctttatccaggccttctccagcccccgtaagtggcaacagcattctagagacatgcagtggtgtgctagtaccatacacacaacacaaacgacacagccagcaacagtggctgggctggttggtggggggcctctggcacctccaagtctcaggctctgtcacagagcagggcaggtctggtccgctcacagggtcctcacagccacgggatagaggagggacaagtgctcagcccctttgatgggtagctttctggtggtgtagtagtggatgacttccgggacactgtcgaacg

SEQ ID NO: 57878 - DNA, 4108 bp, Homo Sapiens
cgggcacccggacccgagtgtcgtccgactggaaacgcaaccagccggggctttgctttcccctacgccacccccggtggccacccggaatttcgcccagagccccccacccgggccgtgacctggtctgtggcctccgctccggagcccaagttccgcgtcttccctgctttcggctgggggtggggtgggaggggaagtctcggtgttcccaggctgcgccgtgagagacgtcgccggcccgaggaggggaccgcctgcgcttgggctccgcggatgggggatcgtgcggcccccgtgaccccggcgcccctcccctgcccgacgaggaagggccccatggctgggaatacccccacggccactgtccatctcctctccttccttttggcccagggtgtctctgatttggtgtctggctagcttgatctcttgcctggggcatttccatttaatgccccagacaatagaactggttaaaatggtcatctctgcatttgcacagtgggtggattggtcttctacttgtctagggttgtcactgtaccaggtgtgcattctggctgtaatacgcattctttaaaccatatcagattctgcctctactcataaagccctcaactgcttcctgacggtgaatcctgcaccctcttcattgcacattctaatgcaccgcacatactctctcacaagtctctgttcttacctaacccgccccccttccttccactgcctcaagctgctctcctcagggtctctattttaagacgtgcaaattaaataccttagaagaacggtagaaacaaaaccattctttagaataaaacctagtggttttgacgtactctactctgccttattgtagttcctcctggagtttcatccttttcctgtttgtttgccctccagttttggtcctattctgctttttcccttgttagtacgaatgtactggagtttgagtgtagaataaagtaggacttcttttcagaatgacttatgtaaggcgaagggcacttgcaaacgtgagtgatttttggagttgcagttgtacttagaagttttgcttaatcccgtttccaaaaggaaggggtatatgtcattctgtcttctttactttttgccttcccctgctggtcctgaaccagtccaaatctgacttatcttttagaatcaggaccaaggtcagatattttcttctcacagatttaccagttagcaatttagattgtttgtaatgataatgataacttgactatagtgatattgttaaatcttaatctgatcccagcattttttaaaatgaagaaattggttccattcctctgaagagccatggcctatgccatgccatttccctttaagttacataaaagaaggcattttaaatgcatgttttatgagtccttgcttaatgactttctaaaaacaaacaaattgtgagttatagagaggttctacaaaacttttgaactgtagtatatcgtgtggttgaattccaaatccatcagttcttaatatttttttctcatcagctcttactgggattaatagcaagatttaattaagtcatctattatttatcaggtcaaatttagttaatacagtaagagctgcttaagtggagtgattgacactttgaggttgacaattcaaatggtgtccgttttaaactaatatatcttaaagagctagggggcactatggagtaataccgtggtttggctgtcagagtgagatcaatgcattcatttgtaattggaacaagcaccggtcagatcgtgaaagaggacttagatcctaaatcgtgtgtgtagtatatatgtgtaaaatgatttacgttaaaagctaaatgtttagtccgcagaacccatttccctgtgcttttctaaagaagctgttattaacatataaaaagaaatagtgtgaatttgagatgggtgagggtatctgtggtaatttggtgggtgtgattggagatattaaggtagagagggataagtgaaatgtcaaagcaatctttgaacagaaaagttctctggatctctaggttgtaaagttgctctgaatttttttttttttttttgagacggagcctcgctcttgttgcccaggctggctggagtgcagtggtgcgatctcggctcactgcaacctctgcctcctgggttcgagcgattctcctgcctcaccctcccaagtagctgggattacaggcgctcaccaccatgcccggctaatttgtgtgtttttagtagagacggggtttcacagtgttggccaggctggtttcgaactcctgacctcaagtgatccacacgccttggccccacaaagtgctgggattacaggcgtgagccaccgcgcctggcccaattgttacttaaagtattccatgggagtaacaattccattgttaatgatgttttttacagcagttatttatccttattcgttcattcactggataaatgtttgtgtgtttttgataaatacaactaccttaaaaactataagatgtttaattaaaacttttgttttaaattcagttttcatggcagaacatactacagtagttatagtggaacaatgaatatggtataaaaataatatcagcaaaatatcacaattatacttattgacgataaaagtttctttatatactatgctttaacatcgatacaagtttgtgtgttttaaaacttagaggtcttttttcccaagtttgactctgaggcaaattttagggcttaatcatctatgtaatgagcaattaggacccttttatttttaactggttcttctctgtctcttgttctatatcactcacaaatgatgtatttctacagaacttgggagattcaagtctgtttcccttttaggaaaaaaatagtggacaaaagagatcttcgttttggtcgaatctatcaaacagtttaacattgtttatgaaatataattacatcatcatctgaagtggtattgtgttagatctcgatgtgaattttgcatccaaaggggaagacaggtggtggtagaatccagcttcctaatacgctttgcaaaggctttgtagtattagtttgtggtttatgaattagagatgctaattttataaaattagcataatgggaaaagaataatagcatgtcagctgttaaactttgaggcaatagtggttgcttgtttgctattcagtgagtgtccttgagtagtttattttatcaatactatacagtattaggaaataactttttccttctagttagtggtatagctagttttttgtctcttaagtaaaattctagaaaagccaattgtatccttaaatgtttttgtattctatttaagaaacagtttctttcttgttgctttcaggacaaaagaaagaaaaataaataaagaagtagtctcttattataatataaaaaataagagtatagtgaacaaaaaagtatacatataattcctccactaatgggaataacccattcttaacattatggcactagtctttttatttaaatgcattttttccatagatgaaagcacatggtacatatatataaattatgttcttttttctacttaatattataacctaggcgttttgtttattatatataactttataaaaacatttttgttagctgcatggtgttctaccttgtggatgaatatcgttttacctaacaattcccttattaatgagtattatgtaattttcagtttttgtttatagtaaataatacgcagtgaatatttttgtgcctgtaactgagtgtgcattttacattttttttagggaggagaaattgctggtaaagtcctaaaaggaaatttcctaagtaacaaggtattatttttacattaaagagtagtgtatttttattaccaaatctgtcgtgtttattattgagaaatttaaaagtataaataggaggccaggctagatggctgacacctgtaatcccagcacagtgggaggccaatgcagatgggttgcttgaggccaggagttggagaccagcctggtcaatatagcaagacccagtctcattaaaaagaaaaaaaaaaaaaaaccttacaaataaaaaaaaaaaaaaaa

SEQ ID NO: 57879 - DNA, 530 bp, Homo Sapiens
ttttttttttttttgtttctatttgtttgttgttgttgttgttgttgttgttgttttgttccaggcattgcactgaaatgtgtgggtttttttttttttttttaaagagatggggtcttgttatgttgcccagcctggtctaaaactcctggcctcaagcgatcctcctgtctcaaccaagtagctgagattataggcatgaaccaccaaacctggcttgatttttacaggcaaagtgggaagcagagaaatgccaggataaggatttatctggaacaggggcacagtgataagatatgaagagcatgtctggggtggctatagcatagagtaaggaaatacagtataacatgaactagcagcatgagctaaagccaaatggtgggagcattgaatgacagagcagagtttagattaattaaacaagcaaaagtaagccactcatttatagttttatcatctctaaaatggagttaataacacctagttcacagagtggttaaggattaaacaaaaccctcgtgccgaat

SEQ ID NO: 57880 - DNA, 809 bp, Homo Sapiens
  misc_feature (688)..(688): n is a, c, g, or t
  misc_feature (699)..(699): n is a, c, g, or t
ttttttttttttttttttaactttttgtagagatagggtctctctgtattgctgaggatggtcttgaacttctggcctcaagcgatcctcctacctcagcctcccaaagtgctgggagcacaggtgtgagccaccatgcctggcctgacactgtctccagtgtttattggtgtttcctgtgttgcacaaagcaggtggtggtgcactgtcaatagtgagtttgtgagtagaaggtgtgggtgtcacacagttggtgtctgtgcgcctggaagcacacacctgtttctgcttccagagttgtctctggcctgcagttctgtgcttcctagcttgatccgttcctctccaggaatctcctctccctccccgcccgacccacctgttggtgagagatgcaactgactgtttctgccacactttttacttacaggtggtacctgtattattctctccacctcttcagggaagagggtgaagagatgagaggctaggggttccaaacacaaacttgacccattttaccattttgttagcaatagtcttgagagaatcaatacaaactttaggtagcttggtactttgcccttcaggacagttcttccctggtaatgttggattgttggggttaaccattactgtgccattacagatgagcttcggctgccctctagtggcagcagcaacctgnatctcgaacanagatcattctagcattgggaccagctttgtgtcatgaatacgtcatcagtgccctacatattacctgacatctatttcggagctatactaactatattgattacaactag

SEQ ID NO: 57881 - DNA, 472 bp, Homo Sapiens
ttttttatgacaaaagcaaccaacctttattaaaaggcattaaaaacaaaacaaaacaaaacaaatacaattctgattaaaaagagacagacaccatgtccacagatgggaagaacttatattctaaagatgttaatttccccttcaatgcaattcttctcaaacttccaacagacattttgttcacagaactttgacaagctgattataaaatgtacctgaaaaagtaaatgtgcaatatgaccaagacaattttaaaaaagaataaggggctgcgcacggtggctcatgcctataatcccagcaccttgggaggccgagatgggtggatcacttgaggtcaggagtttgagactagcctggccaacatggtgaaaccctatctgcaccaaaaattacaaaattagccgggcattgtgtgccgtggctgtagttccagctactcaagaggcttaggcaagagaattcactg

SEQ ID NO: 57882 - DNA, 432 bp, Homo Sapiens
ttttttttttttgactactagacaaactttctgactagaatgcctatgtccacttttttgtttgtttatttttgagacggagtctcactctgtcacccaggctggagttcagtggcacgatcttagctcactgcaacctctgcctcccgagctcacgccattctcctacctcagcctcccaagcagctaggactataggcgcccgccaccaagcccagctaactttttgtatttttagtagagatggggtttcactgtgttagccgaatggtctctatctccttacctcgtgatcccccccgcctcagcctcccaaagtgctaggagtacaggcgtgagccaccgcacctggcctgcctatgtccacttttggcatgcacttctgccaccttgcacattgtagactaacagagtttcaccattcctgtctcg

SEQ ID NO: 57883 - DNA, 1770 bp, Homo Sapiens
ggcacgaggaccccacgaggggcctggagctctaaggcccttgggtcctccccaggtcaggccaagtccatgagccatcgctgagcagcccccagggagggaggggtgtgagcgtgggtgggctcccggcacctggcccagcatccacgcctggtgtgtgggcatctgcctgcagaccctcgtccgagggccccgtctctctggacccctcactgcaggtgaatagccacagtccctcccccaggccctgccctgcgtgttggaaacaccacctcctgggccttccccgtttgctcattcgggatccttgtctgggcactgaggacgatgagctccgcctctgttctcgcgtcagggctcggctcctccgtgtgtggggagacaggctgggatagcatgctgggcgactgtggtgagggcaaagacgcagagggcatgagtggggggctgggggggcacctggatgttcagaggccagaaggcaggactacccgcaggtgcccaagggagacccagggccgcccagaagtccagggggagtcctggggcctcggagggatctgagcagggctgcggcctgacccaggatctctctggcctccctggcgtcttcccaggtggcccaggaccgcagtaccagactgagctggactggcattgaccaggccgaggccaccggccatcctcctccggccagaagctgcagtgataggggacatccctagcagttcacaaagctgtggggagaccccgagggggaagggtttccatgctgagccacaggcccggccacggtgcaaagctgtggggggactccgaggaagaagggttttcatgctgagccacagtcccggccatggtgcagggatttggcacgaagcctctcctagggccggtacacgacctagagggctccctggtgtaccctgggacctggcagagtgcagcttctcatccagcaggggtgggtagggccctggactctcctagggcagcactgtttaataggagtgctatgtgagccacatacagagttaagaagaaataagtaaaattcattttaatgaagtattgcgtttcactccatgtactttgaaaatagtatttcaacaatgtaatctatataaaaattgtcacatcttttttactcttttttttgtagagtctgggaaagccagcaggtgttttacatttacaacacttgagtttagactggcagcttctgcgcccaataaccacaaggctgacagcagggaggtgtggggggtccagaacaatataccctctgtgagtgcttatctcatgcccatgctgttcccaggcgcctgctgtctgtctcctcatcctctacctcatcggctctatggtttgaggccagacctcatgcatcaggccagagtgtcctgccgagacccaggatgcacccctcacttggcacagacaaaccagacacaccagcttctgtctttccccatttcagtgggtgaacctggaaccacccagatgactgggctagaagttgacagtcattctcctctcctcactcccctgtcctcccacccagcacacccagccaggcaggtccttagcttccacctcctgaatctctgacctgaatttcactagaaaataaggaatactacgtcaaaatttatgggatgcagctaaagcaatccttaaaggaaaactagcttgtgcttatatgggaaaagaagaaaggtctagaatcttaaggttttaccttaagaaaccaaaaaaaaaaaaaaaaaa

SEQ ID NO: 57884 - DNA, 3505 bp, Homo Sapiens
gtcccctgcttggagtgggacagtggtcaagacatatacaaccacaaacacccaaacattaacatcagcaagcatcattacatccttgggtggtattgccaagggacttcaaaggccaagattatagagtcatcacacttaggaggtcaaagggactttggaaagcacctttgtcactcattttgttttataagtgaggaggctgaggtgtaatacagctaagcgaattagcctttattacataactcattaggatgtagactgggactaagagctgtttctccagatcccattaggcaatctaaagattctgcactatttctttttcatttttggtatccaaataggtacagttgtttttgatctaggaaaatccttttagactaaacagtaagctctttaaattactctgcttttagatattttttggacttcagaactttgaaggtggtcatccaccaacattggggaatggaaagaaggctccaacacttttctttctagagatcttctttaattttcaatggcagtcactacagaatctagcagttcatgctattgaggccactttgtaggatttttttttttttttagtcagggctccaggtccctggtggtttatgtagtcagtcttatcaacaaccgatgaaagaccaataaaagtgcaagagggaatgaggactgtgtgtgtgtatgtctgcacatgcacacatgcctctttgtgtgtgttggttaacttcatatttggtaggtgggagggaaggtgattaaaaaataatctactttgcatggagttggcccaatttgactgatataggggtgagtgggggttaagaggtagtctatatatcaggaatcttaattagttttgaaaatcctttaggtaaatagctcaacccagttgttcccaaacttcaagtgtatttatagggtctttttaaggggtaaagattccacagagcccttcattttgaccttttgcttctgcactgaatagtcgaatgccttctatatgccagtcattgtgttaggcactgggagtatgagaattaataattttagtctgttgacagataatcataataagggctaatgagtaacacaggctcagggttataagaacagagggggtgtcaaggctgtttttcacaggaaataacatttaagttgagacaatgaaattttagggcttagccatgagaaggtggggaaaagcattttgggctgactgaacagcgtgtacagaggtctggaagtgagaagtagtgtactatagcattttctaggagctgaaaggcgtttagcaagagtatagcgcataaaggagagagcttgagatgaaacaatttctcagtgtgttgtttgaatacaatgtatactgtcaaaatctaagaattcaagaatcatttaatatatctttatgttttactagtcataaaagcatatacatatatttaaatatggacaagatactgtttagtagtttagaaagtgatttatgaggattgcaatcccttgcaataactccacagcccataccttgggaacaactgagctaactcattcagttttgtccattacatcgaagggtgttttttgtaaactcatatgtctagaatgtgtttgccatgttttaatcacaagtagatattttctcagagtccagtgcagtgaagtatggtaagatcctgattgtgttctggaacacagaggaaagaccaccttctgttatagcaacaacacaagtcttttaacactgtgtgccccttcccaatctttcaagtgatgattgaagagactaggtgctcagctcagcctttgagttctgataaatgagcccagactgtaaactggaagataaggatgtttgtaaagttcttgtataaataaagcatggtttctcattgcagtggttactgatttcatagtctgagtgaagatgaatgatgctgtgaatcaacagctttaaagtccgtaccacttcagcttctttttggtttaggtttcttaaaatcagtgtgtatttaatgctttattcagatgagggggtgaaaaacctaacacatgtaaactaagtgaggtggggtttcagagataattcccagcctcacaattcctcatgaagttcttttcctgtgggaaacttttaatttggaagcatgcaacctaatgtgggaaccaagattaacattttctgaaatacttctacaagaaaagcagaaatggtctgtccaggaagctgaatttacatagtagaaaaatgagctgccctgcagtatttggtagtctttgtgtattagttgtgataaaagtgtgtatgtgtgtgtgtacgtgtgtgagagtgagagattgtatacttgtctttgtttccttcacatacaactagtaaggccctagaaaaactacactagaaagtgtgttttaccacaagcgtcccagttctggacaccaatctatacacaaatacttttttttaaagttctttttgtttttccttcttgctgagtaagctatagtatttccttttttttctttctttttatttgagagaagggggggttgagagtagagtgggaatggcaagaagtagtatgacagagcttcttctctttttttcccctctttaccaggaagttaactagaagtcctcatgcatgtttttaaaacaaagttggtaattagcataacctagttagttacctttacacagagtgacagaattaaaaagttgacaagcccatcagacctcagccaggaggtactgaaaggagggagaccagtgagtctagaccaataggtgggttaggcctcctgaatgccagcctagaagtttagacttgattctataggctctagggtacctacaagtttgtagtcgcagccttgggaattgaatgttacataggaactttcactggttccagctagccttggctgttagcaattatttttatctactttaacaggggggacagagtaggggggcaggaaactaagctggcattatggtcacaggaaagaacagactgatttggagcctttcaaactgcagacctttgttactgaccgatgcttaatttggtttctgggttttgttagttttttcccctgcccttacctcatttaccttaacgacagctcccccctctagagctcagctagggcaggctgccactgcggattggggggccaagaggcccagtgcaagaagaaagtgggttgaaagcaaagttctgtttaaagaattttctgctggaaactagcccagagggagtaaagaggagcttaatgaggagcagctgcagtgccgacgcaacccacatgagacttttttttccccttcgttccacattctgtatagtttttttaaaaatcatgactttgaaatagctgttttgtaaagcatgcctctctttttcttcttgtatgtggtgggattttgctttgttgttattgttgttgtttcttgaatggccaaatcctcgttttaaaaaaaaaaaaaaaa

SEQ ID NO: 57885 - DNA, 360 bp, Homo Sapiens
gactatttgtatggcttatgggccatactggtggtgggtcacagtttgctaacccttgctatggtcatgtaccaggcaatggctttctttacagcagcaaaatcttttggtaggtaaatggctctttagaagttaggctttgacaaggaagtcacagtgctcagaaagcagaatgctgcccttcctccctcagctgcaatgctgggggcacagtgtagttgctcaatagatccttcttgcattgtttgggccacatgcttaacaaatggtgaaaactgtgccaaatatgcagacagcttatattacagtggtgaaaagtttgcactctggaacctgacatatttggtttgaattttggtt

SEQ ID NO: 57886 - DNA, 508 bp, Homo Sapiens
  misc_feature (436)..(436): n is a, c, g, or t
  misc_feature (444)..(444): n is a, c, g, or t
  misc_feature (457)..(457): n is a, c, g, or t
  misc_feature (464)..(464): n is a, c, g, or t
  misc_feature (483)..(483): n is a, c, g, or t
  misc_feature (492)..(492): n is a, c, g, or t
  misc_feature (506)..(506): n is a, c, g, or t
ggaaagagggtcttattctgtcacccaggctggagtgcagtggtgtggtcttggctcactgcagcctcaggcaatcttcctgcctcaacgtgccaagtagctgtaactacaggtgcgcaccaccactcatggctgtatttttttcatagagatggggtctccctgtgttgcccaggctggtctcccaactcctgggctcaagcgatccttttgccttggcttccccaagtgttgggattacaggcgtgagccaccatgcccggccagcatttttttttttttttttggtagagagacacaagattattctaaaatgtatatggaaagcaattccaaaaaagaagagtagaggaattgcccttcctgatgttgagaaccgtacagctacagcacagcgttatacggctcctacgtcagacagacatggctggggcancgctggangggaaatgtgganaccacanaacagaacagaggaactcnaagagaccncagacgcttcaggnca

SEQ ID NO: 57887 - DNA, 532 bp, Homo Sapiens
tttgagatggagtctcgctctgtcacccagcctggagtacagtggcacgatttcagcccactgcaacctccgccacccgggttcaagtgattctcctgcctcagcctcctgagtagctgggactacaggcatgcgccaccgtgcccggctaatttttgtattcttattagagacggggtttcgccatgttggccaggctggtcttgaactcctgacctcaggtgatccacctgcctcggccttcccaaagtgctgggattacaggcatgagccaccgcacccggcctgcttgcaatattttctacccagaacaccaatcctctcatccagttcttcacctaactggcttctttgcatccctcagtgctctgctcagatgttgcctttaaagtagtatccctcaacacagaaaattccagtactctctgtcacagcactgttcatttctttcttacctagtactaatcaaaattttcttttgtaacaagcacagattctgaaaccagactgcttgaatgtgaatttctgctct

SEQ ID NO: 57888 - DNA, 1117 bp, Homo Sapiens
ggaaaaccaaggacattggtagagatccagatgtccaccatttggttcagcccaggacttgaagcttctgaaggccctgtgcacgttggctttgccctttctgaggctatgtgcccagtctctaccagtctcacgtgcccagcaagcctcttggagtgtggacagaatctgctgcttgcttttttctgcctttgtgattttttttcctgattataaaagtgtgtgtgtgtgtgtgtgtgtgtgtgtgtgtgtgtgttttaaagagattcaaacaactcagaagtgtacagtgtgaatgtgaaggcccctagtgattccagtatgcccctccataatccctaagagtttgctatgtccctgtatgtccgaattttttcctattaacatataaacatatagtaacattttcttatgattttgcagcttgccttttcgctggacaaaatttaatggaaggtgtggtgagcttccctgcctgccctagtgccctgtagtttagcagggcgtttgtttatctgcacggacccttgataggtttggtttcctctccacttcttgctatgacaaggcacaggcagtgcatgtctttgtacttgaagcagggagcacatcatgagtatttccaaggactagagtccaaaggtggaattgccaggttgtttagcattctgatcaacaatggctacttgccccaaggtcgtactgactgatgagagtgtttgctttccctcagccatattgatgaggttctctttttaatatttgctaattttgtgagcaaacaaaaatgtctcattttggctaggtatggtggctcacgcctgtaatcccagcactttgggaggccgaggtgggtggatcacctgaggtcaggagttcgagatcagcctgaccaatatggtgaaaccttatctctactaaaaattagccaggtgtggtggtggaggccagtagtcccaactacttgggaggctgagatgggaggatcacttgagcctgggaggtggaggttgcagtgaactgagattgtgccactgcactccagcctgggtgacagagtgagaccctgtctcaaaaaagaaaggaaaaaaaaaactcatttaaaaaaaaaaaaaaa

SEQ ID NO: 57889 - DNA, 501 bp, Homo Sapiens
agcggccgccctttttttttttttttctgagaagtttcaaaaagcagagtcttaatgaggagaaaataatttgaaaacatatctcaaagcagaaggatccagagcttgcacagaaagtaagttatgctggtgagaggcttcagaataaagaatgactatattggtccatgatgtaaatataagccactggaaggacatagaaaagaattagcatggccacagttttgggccaaaaaagactattttaggaaaagcacggaggatcgactgcagcagatattggtgataggaagtcaaatgaaggtacagcatgatgggagagatcattcttcttagggagagacagtaaggcagggagaaagaaaggaacagggcagtagagcagaattacgtgaaggcatagcaggcttctgccttggcagcaggtcaggtgtgcacaacatatccaaaagaaacatttgaaacaccagctgaggcagtgctgtgagaagatgaattctt

SEQ ID NO: 57890 - DNA, 566 bp, Homo Sapiens
  misc_feature (498)..(498): n is a, c, g, or t
  misc_feature (542)..(542): n is a, c, g, or t
ttgagatggagtttcactctttcacacaggctggagtgaagtggcgcgatctcagctcactgcaacctccgtcccccaggttcaagtgattctcctgcctcaacttcctgagcagctgggattgtaggcgcctgccaccacacccagctaatttttgtatttttagtagacgcagggcttcgccatgttggccaggctggtcctgtactcctgaactcaggtgatccacccaccttggcctcccaaagtgctaggattacaggcgtgagccaccacatccggcctcaaatagaccaattctgaattggtaagtgttatctctgggtcttatattaatcctccactcgccatgcccctgaacctcccaaaaccccagaaccctgtattcctctaggccttcactggactgggacactctgccctcagtaccatttgtggccctggcaagccatttcatctgcattggcctggtactcggcattctttttattgacactngtagtggtcaggtgcatgaacttattgccaaggctcttcatggnaagcgaataccctgaagtaaggaa

SEQ ID NO: 57891 - DNA, 393 bp, Homo Sapiens
ttttttttttttttttttgagacggagattcactcctgttgcccaggctggagtgcaatggtgctcaagtgatccgcctgcctcggcctcccaaagtgctgggattaagggtgtgagccaccgcacccaggctaaaatgtttttaagttcaacctgaaaatataaggaatatttcaccagaggaagaagggcattccagctaaagagatcggcttgagcaaaggcacagaggcgtgaaaagtacaaagactgttgaggaagatccaaaaaagtcaatgcagccaggttgttagcagtgtggtggggacagctgggaaaggagtgtggaagggacattagagacagatcctgaagggcctccagtgccacctagagaatggggacttttcccaa

SEQ ID NO: 57892 - DNA, 563 bp, Homo Sapiens
ttttttttttttttttttgcatcttttagcttctcaccatttctccttgaaatttcaacagtggcagctcgacttgaacttgagtcaggtggcggccagcacccttactctgtcctttagtcttgccctattctaacaaattcttcctttctcttttggctgttttcagtttgtttattctttggaccattttttttaaagtaagaaatccctcttctatccttggtgctggtcatctgttctctcccttttcccaagtgaagctacgatagcttcatttacccttcttgtaaatctttgaaagttctattttgcacaagttgcatttcttttttctgtcctttttactttgtgtctttgctactctgtcttcaacaaattatgtctatatatgttccatctaaccctcaaggccattctgtgatgcaggttcagttactattgccaccttcaaaagaggaaagtgaggctcagagaagaaaagccttgccagaagctccaggccagggaggagagggcctggacctgtcccttctgaggtgtgccttacccacagggtactc

SEQ ID NO: 57893 - DNA, 2073 bp, Homo Sapiens
ggtgcctctgcagcaagcgtggggcgcgggaacccgagcaggttcgggggacggaatgaagggccgggtgggctcgcgaggggccggggagtccgcggggagcgagggagtttccgaggggcgggtcgtgttcctggcagcgtccctccagggcaggcccgccccctttgtcccagttccccgctgcccgggctggggcggccggggttcattcattgccggcctgaggactcctagctcggccccgctccgcgctacagcccaaagcccagcctgagacccagccgccctcgtatgcccacggcctagctccccttccctccaacagacagactgggaaaaccgagtgggcgacggctgagcaaggtcactccgctgtcgggggcgcagccggcctcagaccagctttcgtgcttcccagggcctctctgcgaccactttcggggtccgcgccaggcgcggggcgggggcgggggcggcttcggcgcggcgggcagagtccagcgggcagcggtgggggaagggcgagccgcctggggagagggccgggctgcgagcctggcgatccagattccagcccgctgtcgccagctgtgggaccgaagggcaactgtttcacctctctggccctagtatctgtatctgtaaagtgccagtgataacacctgtctcaccgagatgctgggggaattcaggaaaatcatgcaaaagtgcctggtacggagcctggcacgcagagggctcttggtcaagtgggttggagctgcgtgagcccagaaggggatagaggcagcgtgggggaaggcggcagcgggcccggtcgctgggaatgaaaggcctcagtgtctggggcttcctccccgtactacccgcagagtttgttcagggtggaggtgcgcacctggccaagtccacgtctacacggcccacccagagtagcctaagttgggcgggattcctaactctgagccaggagtgaccgggctggccctggcatgggcagaggctgagcgggggttggggtggggccccctccaggaccaaccacggtgtggttgcccctgagctggcctcagcctgcctggcaaaggacctcacccttgaggccatgtgatctatttcctgcttcctcccagctgacccttgagggaaagggggtgggggccgcctagagcaggaggtattagtcactgcgcccaggagccagtttacacctagcgaaggcggaggcattggacaagcctgggtctgagcagacagaaccccttcctgcgaccctggagtcccaatcgtgctgccattttccttctgcccaggactctccagtcctcagtcaccttggacaaagaagtgtggatcctcagattccatcttttccaactccaaggtgccatggcagagaaggtgctggtaacaggtggggctggctacattggcagccacacggtgctggagctgctggaggctggctacttgcctgtggtcatcgataacttccataatgccttccgtggtgagcggggcagtggggctggggctacttgaggggatggcagaagcaaaaccctgggttccacctccaccaccgggcggggaatgtgtgtctggctagtccctgggaacacagcaccccatgtcgtgatgatgtggcctacatgtaccctaccaggagggggctccctgcctgagagcctgcggcgggtccaggagctgacaggccgctctgtggagtttgaggagatggacattttggaccagggagccctacagcgtctcttcaaaaaggtgggtgcaggctgggcacggtggctcacgcctgtaattccagcactttggaaggccgaggtgaggagatcacttgagcccaggtgttcaagaccagcctgctcaacacagtgaaaccccatctctacagaaaaatacaaaaattagctgggcatggtagcccatacctgtggtcccagctactcgggaggctggcatgggaggatggcttgagcctgggaggtggaggttgcggtgagctgagatggcaccactgtactccagcctggacaacagagcgagactgtc

SEQ ID NO: 57894 - DNA, 1880 bp, Homo Sapiens
gatgttcaacatagaaagggattgtgactgtacccctcatccaagcttgaacctaggggacatgcattctctgtggatgcagttaccctgaagtattccagaaaggctgtctacaggtgcatccatgctgagctcccatgggggaagcctcagctatgtcgatagtggatgaagaggagaagaaatcaccttctccaagacccttcatgggcaccagggctgactggctgttggggtagagccacagacgttttctgctgagccaagcattgcaactgtgcctctgctaaaagaaacttcccagaaatgggaagttctgggacttaaggcctgccatcttgtgttttttgtttcatggagtgctcccttgatgtcatgtacttcttcttcccttaggagtagaaatccctgaagtccagactactgtgaatgcaactcttatctgggtctagctgcctagtggggctgccacactccagggtggtgctgggggatgtctccaaggaatccagtgatgtgacctgtcctcaagtatcccagcagtgggtaccagcaccagttctgatggggatggcaggggagtgctgtgagattccttggtcatgaaaagccttagtgtgttggttttctcaagtactggttgtagtagtagatgaactggtcacatggacagactcaggatctcttggttagccagggtgttgcaggcaatagtgattgctgaggtcacacatgacttttctccttcctgcatgttgtcttcttctgcctgaagatgctaatctcctatgtcagttggcctccaaccagaaggtggtgcttgcaaaagagtaccagctgtggtggtggtaggatttatgctttgccttatgtacccaggggaagtactctggtgtctcaggcaattggtggggctatagagctccgaaaagtttctgttctttttattaagctaccagggtaggattgaggggcaaagccaggtgagggctgggtcaggcaagtctgtgctctagctctccatatgtgggcaaaagtagaggtcccagtggggatcagaaggcagttttctgactgctggggtatattgaaggaaaaagcacagctgcttctgctgcaccaaagagtctgcatggagaatggggagtagcaggtagcagcaagccctacgcagctttcatgcacttggcaaggcaaatctcatagccacagtgtaccactagcagcagctagctgggtttcagacagttgacactcagaactcaaaactgccccaggccattagcctttgcatggccttcaggccacatttctcttggtctccctacacagcaggggcacccctgtgctctcttatggctgcagcacacttcccacttgcccctcagttctggccaagggagcttgttcccactcatatcgtgaatctcagttgagcttctctcaacctgtgattgctgtctgagttagctggctgacttccacaaggtcccctgtgaggtaggatcagcagtggcttccctctgtccttgctggagactgggagtgcactgaaagcatgtccagtgctactccttctcatatactccccacggctcactgaatcagctttagtgctgggtagggttgagggcttcccttgtggcctggattgccaggttccccagtaggagtgcatatcctagaggtagtttatcctcctctcacactctagggacttagagttttccatctgcctcgtagtaagtttctgggttttttcctgaaaaaaaaattcacagtgtgaatctctccacactattttgtctttccaagtggtagaggcatgctcacagtgcctccaatccactctcttggggattaaaaaaaaaaaaaaaaaa

SEQ ID NO: 57895 - DNA, 456 bp, Homo Sapiens
tttttttttttttttttttgggtagaacagggtcttgcactgttgcccaagctggtcttgactcctgggctcaagtgatcctcccatgttggcctccaaaatgcttggattacaggcatgggcccctggcgcctgaccattgctgacacttcttcaagcatcagttttactctaaagtaattctgataacccaatgtccataaatgatgaatgaataatgtggcatatccatacaatggaatgttactcagacacagaaaggaatgaagtagtgactcatgctacacattaaccttgaaaatactatgctaggtctaagagcccaggcacacaataccatatcttatgtattatatacagccaagcatcacttaacggcagggataccttctgagaaatgtgttgctagccaacttgtcatcatgcacacatcataaagtgtattcacacaaacca

SEQ ID NO: 57896 - DNA, 1455 bp, Homo Sapiens; identical to SEQ ID NO: 24609

SEQ ID NO: 57897 - DNA, 591 bp, Homo Sapiens
  misc_feature (559)..(559): n is a, c, g, or t
ttttttttttttttttttgagacggagtctcactctagtggcgcgatctcggctcactgcaagctccgcctcccaggttcatgccattcttctgcctcagcctccagagtagctgggactacaggcacctgccaccacgcctggctaatttttttgtatttttagtagaggcggggtttcactgtgttagccaggatggtcttgatctcctgacctcgtgatccgcctgcctcagcctcccaagtgctgggattacaggcataagccactgcgcccagcctatttcaatcatttcaaatacagcaattcccaggaggagatcacactaccctgactgcctcagcagagtcaactgaacataaccatcagctctcttgggtggcttggtcatcaggaggaacttgatccatgacgttgatggagagggccccgaggagggtgactgtgggctccagagtcaggtgccctgtgaaatgccaaacctctttggttcttctaccagttttctgtcatgtttctgtcctttttctggtccatgggagtcacctgcatctcctgntggctgcagctcttgttctttgcagcatttct

SEQ ID NO: 57898 - DNA, 604 bp, Homo Sapiens
ttttttttttttttttttcatgaactcacaagtgatgttgccattctttccatagcacacactaggatacggactctgctttgctgggagaagtctaagaaagacccaggaggagggataagaaggtgttggtgggggtggggaaaacagttctaaaacttcagcacccaaaatgaatgcaggagctgcctgagtcattttagcacaaagagctacaagtgtcatcccagctcctctcctgtcctcgagggattccttcttcatcaagaggcacagcttctagaggcccctgtgtatttgtttccagcctatcatttgttcttcctgaagtgctctttttcttcaattctcttttaatccttttgatgacatagggaagcagcttcaactaggtgacatctgtttttaacagtttgggttaacatcgactcatctcttttttttgcccctgagctttactgaggtatacttcacaagaaaaattgtatatattttaggtgtacaacttgttttgatataggtatacattgtgaagcactcaccacaattgagttgatatatctatcacctcacatagttgccattttctccttccttcctccct

SEQ ID NO: 57899 - DNA, 340 bp, Homo Sapiens
tcctggaagggcaaggaatgtcatggaagatagcactaacagagtcatacagaacaggtgcacatcagctgtatgaaggcaagtggccttctaggcacacctgtaaaaacagctggagcaaaggacacagcacaccatcttgttttttaagctatgcctcccattagtggatctttccatgatatgtaaaatatcagagtgcactgtacataataagggtcaacattgttctggaaaatgtagagtgtatgtgaatagtatatgtaagtatgtaaacatatgcacattggatcatgacataaaatatgtctctaaagtgtggattgttgaaaaaaaaaaa

SEQ ID NO: 57900 - DNA, 4985 bp, Homo Sapiens
agcgtggggcctactacatgtggatggaccttggaaacatcatgctgagtgagagagagccttggtattgtttcatctccccaggagattccaaggtgcagccaaggttgagacccactgacaagcaatggatatggttgggtgcagatgaaataaggcagccaggggcaggagggatgtctcattgaagatgactgtttgtggatgcctagcaggggtggggatgaggtatgataacagcaaccccaatctcaacacagcgtgaccgattttatcttcggtcagctgatacacctcatggggtgtggacacaggacacctctgcctcccaggttcaggcgataattcctgcctcagcctcctaagtggctgggattgcaggcatgtgccgccacgcctagctaatttttgtatttttggtggaggcacggtctcgtcgtgttgcccagattggtctcgaatttctggcctcaaatgatccgcccgcctcggcctcccaaagtgctgggattacaggcgtgagccacagtgtccagcctccaaattctatttgaagtttgactttccacctccagaaaatccaaacctttgcccaagtcacagtgggacaccccggagttaatttgagagaaatgtgtttttaaaaacgactccaggccaggcgcagtggctcacgcctgtgatcctagcgctttgggaggccgaggcggacggatcacgaggtcgggagatcgggaccaacctggctagcacggtgaggctccgtctccactggaaatgcagaggattggccgggcgtggtgtcacatgcctgtgagcccggctgctcgggaggctgaggcgggggaatcgcttgaaccggggagtcagaggttgcagtgagtcgggatcgcgccactgcactccagcctggtgacagagacagattccgtctcaaaattaataaacaaataaaaccctccgatatgaacaccaaactagaatcactccattgacttccctctgccaagcagggggagtgatggtgatgttgcatgagtgtctatttgcattgagtcttaatggaaaataaggttgtgtcactcaaaggaaaaacaaatcacagcccagactggagctgtggatgaataacatggctgagtgttggtacaggctttccacagcaatattaaaactgaaaaaatcaacaatgaagctcccagccacatttctgcctaatgatttgggggaaaacaacagaggcacgcctcaacttttccttcactgcacaaagtgggtttggctggaaatgccaaatgtgtttgttgctgggatctttcaaatgaaagcaagctgggagtcaacctcctgcagccgcaggccagaaatgggttgagaccaaactattatagtcacactggtgcacatctaaacagatttaactccctcacaacaagctagattaatttaatatgctttcttagtggcattccgcatttctcattaaagcaaatgaacgtccatctctctgtgataaattagggcaaaaaaaattcatatgtttagggcatagggaaggaggagttgttggctggtaaaaaaaaaaaaaaaaaaaagtactgcaaatggcctttcaaagtctagacatcttcatcataaacacaaacattcctcttcacaaaggacctcaagtaaccttaggctggagggcccacctgcgtatgtttttcttctcattctttcttaccttccctccagcccacccagcccacattcagtgaccaagtcacgtgggttttacctcctaaatctttctcagatccgttcactgctcagccactctcctgacaccaccataaaccaagccaccatcacctccagctgtctgactgcaaatgcctcctgactggcctctgttttcccctggccctgtgacattctgcactcctcacagggaccaaagcaatcacttcagaaggtgcatctaaacagatcactcactttcaatggctcccactgctctgtgggttaacaatgataaaagcttggccaggcgcagtggcacatgcccgtgatcccagcgctttgggaggccgaggcgggtggatcacgacgttaggagatccagaccattctcgctaacatggtgaggcccgtctctactgaaagtaccaagaaattggccgggcgtggtggcgggcgcctgtggtcccggctactcgggattctgaggcgggagaatggcgtgaacccggggggcggaggttgcagtgggccggggtcgcgccactgcgctccggcctgggcgacagggtgagactccgtctcaaaacaaaacaaaacaaaacaatgataaaaggtcacctttactgagcacacactatctcggtccatccctacatcagccctttatttcaccagtggggaagctgggacacagagtagttacgtgggatgcccaaggtgggaccactcctatgaagtttcaacaccctaatgtgagatcctccatgacctagcccctctctttctccagcctcatttcctgattctctcgcttgccctgcaggcttcaaccacacaaacttcttgaaagtacattaaatctggctgagcgcagtggctcatgcctgtaatcccagcactttgggaggctgaggcgggtgcatcacctgagatcaggagttcgagaccagcctggtcaacatggtgaaaccccgtctctgctggatatccaaaaattggctgggtgtggtggagggcgcctgtaatcccagctactcgggagactgagacgggagggtcgcttgagctcaggaggcggaggttgcagtgggccgggatcgcgccactccactccagcctgggcgtcaagagcgaaactccgtctcaaaaaaaaaaaaaaaaaattaaaagtcccttaaatctgctctatgcctatcaacctcagggacttcactatgctgttcctcaccctgaaatgctgttcctcattttctgcctagtgaactcatcccaccccatacgcctctccttaagtgtcatctcttcaaggaagattttacttttttaatataactattaaaatataattcgggtactgtatgatttgcccatttaaagtgaacaaatcaatggtttcagtgcattcacagagctcggcaaccaccattatgatcaattttaaaacattttcatcaccccaaaaagaaaccctgtatccatgagcaggtacctgccatttcctcctcccactaagctctgacaatctactttttttgagatagagtctctgtcacaggctggagtgcagtggcgcggtctcggctcactgcgacctctgcctcctgggttcaggcaattctcctgcctcccaagtggctgggattacaggcttgtgccaccacaccaatctaattttatatttttagtagagacggggtttctgtcttcatagatttgcgtgtgctggacatttcatataaatgaaatcttataatatgtgacatttagtgactggtttcttccacttagcataatattctcatggttcatccttgttgtagcacgtgttagtacttcattccttttgatgactgaataatattccattgcatagtcaaaccatgttctacttctccactcatcagtagacaagcatttgtgttgttttcactttggcgttattgtgaataatgctgctatgagcatttgtgtacaagtttctgcatagacatatattttcatttctttcataaactggagtggaagtgctgggtcatagaactctgtgtttaagcttttgaagaaatgccagactgtaagaaagaaagcctttcctgaccctgcgagactgagctccctctctccatttatacgttctctttatgccctttgcttctctttcagagcaattcacgttgatctgggtcaccctcaacttaaggctcataactcccctagaccctcagggcccacactaaatgtgatgaaataggatgcaagccacatatttacttttgcattttgtagtaaccatattttaaaaagtaaaacaaaagaagtgaaggtaattggaataatatcacagatttaaataaatctatccaaaataccaggtctacatgtataaactattttaacattaacacaatgctttctttttatattaaggcctcacaatctaatgtgtatctgacacttctcacacatctcagtatgatggcagcaccccatatgggaggccctcccatgatgccaatgatgggccctcctcctcctggaatgatgccagtgggacctgctcctggaatgaggctgccatgggaggccacatgcccatgatgcctgggtgcccaatgatgagacctcttgcccatctcatgatggtgcccagttagcccagaatgacttgaccagacagataaggatagaggggaggcctcattacatcagtgttgtttttttgttgttgttgttgtgtgttttttcttttgttttgtttttgagacggagtcttcctctgtcgcccaggctggagagcagtggcgcgatctcggctcactgcaacctccgcttcctggattcaagtgattcccctgccttagcttcctgagtggatgggactacaggcatgcgcaccatgcctggctaattttttttattttggtggagacggggtttcaccatgttggccaggatggtctcgatctcctgacctcatgacctgcttgcctcggcctcctaaagtgctgggattacaggcgcgagcagctgcgcccggcctatatgactttatatttacctgctcccttcaccaggagatcatgggctgtgatgctgggttttcttaacagcataaggaagacttgcccccttgccctatcaaagagaatagttttggaggggagaagtgggaccaaaaaagatgcagttttcatttgtattgggaaatgtgaaaataaaattgtcaattcttttagttaaaaacaaaaaaaaaaaaaaaa

SEQ ID NO: 57901 - DNA, 3364 bp, Homo Sapiens
ggcggcggcggcggcggcggcccgctccagccatgccgaataaaaacaagaaggagaaagaatcaccaaaagcagggaagagtggaaaaagttcaaaagaaggacaagacacagtagaatcagagcaaatttccgtcaggaaaaacagccttgttgctgtcccgtctacagtatctgctaaaataaaagtaccagtctctcagcccatagtgaagaaagacaaacggcaaaattcttcaaggtttagcgcaagcaataatagagaacttcaaaaactaccatccttaaaagccttttcatctcttgcagtttgcttggcatttcaccatttggaagaaattagtatcatcagtacctctggagtttgcactatgctctgcttatagattgtgtatagttacctgctaagatggtcctaagcacatgtccacggcctcagttcagagtatacttaatgctccctattcagtctttctgttcccgtgctccagtccgtgaagtctagagtaaaataagaaattggcatttatatacatctcccctcctcatctttaactcttttgaagaagagagttttagtatcacattcataagaaatttcatctttaaaagttggtattgcaggcgcagtgcctcacgcctgtaataccagcactttgggaggccgaggtgggcggatcacctgaggtcaggagttcgagaccagcctggccaacatggtgaaaccccatctctactaaaaatacaaaaattagccagcgtggtggcgggtgcctgtggtcccagctgctggggaggttgaggcaggagaatcgcttgggcctggagacggaggttgcagtgagccgggatcacgccactgcacaccagcctgggcagcagagtgagactctgtctcaaaaaaaaaaaaaaaagtgagcaatatctgtggttaatctcaaatagggtggctttccgtgtcatttccctttagttgtttttaaatgcagatgttgctttaattaaataatatttgaaataagtggggtcccaactataaccttatatcttattgtttttaaatgttgatattttggtgttttcagtagaatttgagctgttaacagtgattaggttttttcagtttgtcatcgatgtatgtgacctcgttataatacacatggatttttgtctgctggttgtgttactcatgagcaatgtgttctaattatggtattttaacttataacttatgaaaaagttatgtttcactctagggaacaagtcctgaagaaccctcaagccctaaagtaccacctccacttcttcctgagttgctggttcttatttttggtgggcttcaaggaagaggtgggtggtgagggtgtctgtatatgtgtgtttacatttgtagacagtttctgtacatgtataattaggaatgggttgtcggttttggtttttttcccagctttatgtaattggtcagacttctcaaaggggggtagcacttgataatcgctctcttggaactctgaagcctttgcatggagcagtgttcaccctgggcagcctgtggcccctggggtcacagagctgctttccagggggtttgcaaggccgtcactgcctcataagattaccaagatctaatttacctctcactgtgtggacgtttgccctggtggtgcaaaggcaatggtgaggaatatggcgcctttctttcatcgagcaggacagcggtgttcagctagcaacacaccagtctgacccaagaatgtcctcgataaagcatgaagttactggttttttaagtctcaactcttttgtatacctttttaattttgtttttgtttgggtttgtttttagttttgtttttgtttgggtttgtttttagttttgtttttgtttgggtttgtttttgtttggttttttggttgctcaggctggagtgcaatggcgcaatcacagctcactgcagcctcaacctccccagctcgagcattccgcccaccgcagcatcctgtgtagctgggactacaggcaagcaccaccacacccagcgtggttttttgttgttgttgttttggtagagctggggtctcactgggttgctcaggctggtctcaaacccctgggctcaaatgatcctcctgctttggcctcccagagtgctgggattagaggcgtgagccaccgcacccagcctcctttttaattttgcgtgacgaaatgcagagttcacatgaagccgttctagcatgctggagtgtgatggccgtctcgaagaaaagcgcccatgtgatgtgtgagttatgagccaaaatagccactttttccaggaactttaaattatgagaatagtaatgtaaaatcatttttacttgacagaacaaaaagcagacaaactgtggatattaagacttaaatatttggctgatattttctagaaaatctatgaagtgagcttatcaattgaggggaaaacaactgcgacactgtttttggcccatggtaaaatttgagctttcaagaaaaatttgaactttggagaacttttatctgccagtgtaaatgtggcagctcccagtgccacagactcttctgctgagaggggtggtgacattagcaagtggggtttcttgatgtatacggtggaaggtcacacaccacatgcagcagtgtgttctcagtgaccaacgaacgatgctacaaacaagcgtgggtgaagagccaccaaagtgtaagacacactgccgggtgttcatgtaactgacaggttcatcaacatggtttcagattcctcattgcaactaatctttaaggaactatcacttgttgaattttagcataggcaaagaagaacatcggcaattttttgagaagcattgaaacctcccttttcccaccagacgtgtctgtctgagcctggggtgtttctttacatatacttgaaccagaatagcatatcacagcaagttgaacacagaagcatgtcggcagatccgcctgtcttctgttgagtattgaagatacatgcaaaaatgtacaacatggccattttctcgctggtttctttttgaaaataaggttattttcataaaatattacttaacatgaagtgaacctattgctaatttaatgaataagtaaatatttttaaaattttcaagtatggtcagtatcaatggatataacccccataatcaaagctctttagggttctccatactttctaagaatgtaaataggtcttgacaccaaaaaaatggaaaacacgtggacttggaagtttttctcgaatgggctggatgtgaccctgaccctgtttttaccaagcctccttggttttttccctcttttctctaaaaaaaaaaacaaaaa

SEQ ID NO: 57902 - DNA, 2619 bp, Homo Sapiens
cttaagatccttaagctcttgctgaacttcctttttcaatgaaaagaaggaccatcatcctaggatggtcaccagcccaagccaccaccccagccacccatccaggaggttggttccttttgcccagttcatagcagctcagtccttaccagatggattcttggtgttgggaagcagcctctttttattcctgaaaggcaatgccctgtccgtttgcagtagagaatccccagggagcaagaaagatgacagaagtgtggctgccgtgtttctaggtcatgagagctctggcgatactaccacaaggcctgcacgtggactctatgataacttgagtcttccatcatgtttgccaccagccctccctgagtgcccagaggagatgggggcagagtcacttggcctactaaagcctcctgttccttctggctcatgcattgctttgtggtaagagaaaggaagtctttagaacagcgcctgggaatcagcccttctccctactgagtccccagtcctgtcccttccctgactcgctcctcctccaaccttggtttctatagctgcattttttttttttttttttgagacaagatctcattgtgttccccaggctgaagtgcagtggcatgattctggctcactgcagcctcaaactcctgagtccaagctatcctcctgcctcagcctccgaggtagctgggaccataggcgtgcaccaccatactcagctaatttttaaaattttttgtagagatggggggggggtctccccatgttgcccaggctggcctcgaattcctgagcccaagctatcctcctgcctcagcctcccaaagtgctgaggttataggtgtgagccactgtccctggcctatacggtcattttttaaaagatattttaaaattaaaagcaaacaacactgtccacccatctacctgtccaggataaggcatatttggacggtgaacggatttactctcgttcatgcatttgagcgcttcacagaagagtctttcttgctccaggcatgacattttttttcaccagacgttcactgacttcgtgactttgaggtgagacatgggatctctcagaagcgtctctgcatctgcatttcaggagatgagctgctgtccctggtggacagaggcggtctctgccatggtcaccatgatgccctacaagtgtttattgagtcccctggggggcacccagaataccacccaaaatagcaagaagacccggtccccgccttgcggacgatgcactcacacgccacagcaacccattctcgcctcttccttggccgggaacccggggctctagggctgctcgctgctgctgtggcctgcgcagccacgggaggcttcctgaaaggcattgctcggaggggcgggggcggggaggcctagcctgccccacagacacagctgtgaggcctgggtcatacacataccagcaagcagctgccgagacaaatggtggtgggaagtcctgggaacacacacagcctttgcattgacagcacaagtaggatcagagcccaggtgagcccctgaggataccgaggccttccctccctgaggcccgcaagtctccatgcgtctcccgggagcctggccccgctgcagaaatcccttctcttcctccacaccctgtcctttccccaaaggctcgtgttatcagttccagctacccatcgactttcccaccgagccgctgccctcaaaacggagggggcaccgcagcctccttgagcctggcatcccaggccttgccaaaggggacggtggcttcctggataattggaaatctctgagaagaagaggaaacacctgagtgacactcagctgtcctctggggtcccctggtgtgcatgcacgtcctcctgaatacctgtacttccaagaggtggtctcctgttttcataacccaacactctgagataggatcttccaactttttagccccggctgtggaaagatagtgagtatgaagtctttgtgcatttggaagtgacatcgctgtgtggattatgaatacagagagctgccatcttcctgatcacaatagaccacgattgcaaagcctcctctcccagagaccccttctgcgcctgccctccccacccaccacccagctgttgaagctcggcgtgtgcaagtcagaccctgcacaggccgggggtgtctcacctggcctaaacgtaaaggcttgtgccggagacagtgattgaaaacatttgaaaagccagctctccctggcagagaaagacacttcccccccaaagtggaatttagatgtctttccctagtccatcaagaagtcatttttgtaacagtccctaagcgagtgttctcaattagaagagtttagtggcttttggtgttgttaaaataataagaatccttctagcatccaaagctttctaatttttttcagggagatttggacattaatgaatggaaacttccacggtggcggtcactcctgaaggcagcggcttctgttctcccgctgctgtaactctgtgtgttccgtctatcgcgtcacagtgccgctggatctagatggagccactgttgttgtttttaaaagagaaataaattccttaatgg

SEQ ID NO: 57903 - DNA, 578 bp, Homo Sapiens
tttgagacagggtctcactccgtcacccaggctgacatgcagtggtacaatctctactcactgcaacctctgcttcccaggctcaagcagtccttcagccccagcctcccaaatagctgggactacaggcaaaaactaagagagccaccatgcccagctaatttttttattccttgcagagatggggtttcgccatgtaggccaggctggtctcgaactcctgacctcaaaatgatacacccgcgtctgcctcccaaagtgctgggattacaggcgtgagctatttttaattcttaatagaaaataaccctgttatctaaagcatggattcactacaaaataaagattaaggtccatcaaggctttctagtaacacttatttaaaaaaaaaaaaaaaaaagatcaatcaaggctaaaaacattaaaaagagagagaaggcaaccaaatttccaggattatctcatccctttgctcgaaaccctttaatatcttcctacctcactgagtcagtcctacaggccatttcttactattctctttcctcttctactccagccacactgggcaccctgctgtc

SEQ ID NO: 57904 - DNA, 2363 bp, Homo Sapiens
agcggccttgcgcggtggctcatacctgtggtcccagcactttgggagacccaggcgggcagatcaccctaaggtcaggagtttgggagcagcgtggccaacgtggcgaaatcctgtctctactaaaaatataaaaattggctgggtgtggtggcgcgtgcctgtggtcccagctactcggagggctgaggcgggagaatcactttaacgcaggggacagaggttgcagtgagccgggattgtgccattgtacttcagcctgggcaacagagcaagactccatctcaaaaaaaaaaaaaaaaagattttggaaaagagttatttttgacaaaggcattgggaaataaagagtaaatgatggatgatgctagtagttaccatttaaagaatacctactaagtgccaaacactaagttgtaagtttataatcacattgtaagcatgttttcattgaaaccaatataacaatcctaagagatagataccattttcattattttactgctgaggaaactgaaccatggagaagttagctaacttatccaagttcacatacctggtacacagtagaagccagatttgaagccagatatgtctaattatatcaaaacttgacctacctctgaaggatacatagctagaaggattttttaaagacgttattatgcctttgtgttcatgctgattacaagagagaagagagtaaatgatggaattcaggacatgctaccccaaaatatggcacgttggcattggatacaacaacagaagcaggaaggtctctctgaccttctcctcacccttcttgcctgaagcaagctataaagaattttctggcctgcctctaaagtaagtcataaaaccttcattgcagaggtacccaccccatagctgaaggaaaagaatgtccttatctctgaagacagaggaacacaaagaacaacaggccttgttaattcctcccagtttattactgttattagattagacccaattgtcctcaaatcaatttctccatgactgtctcctcttcatcatacacagatttccttcttttctgaagtcttcattttctttctttctttctttctttctctttctttctttctttctttctttctttctttctttctttctctctctctctctctctttcttttctttctttctttctttctttctttctttctttctttctttctttctttttggagacaggatctctctctctgtcgctcagactggagtgtagtggcatgatcatggcttaccgtagcctcggactcatgggctcaggggatcctcttgcctcagacacctgagtggcggggactgcacgcgtgtaccaccatgccctgctaaattttgtattttttggtggaggcagggtctcgctgtgttgcccaggctggtctcaaactcctgggttcaagcaatcctcccacctacgcctcccaaggttctgtgattacaggcctgagccacagagaccggctgaggtcttcgtttctgaaggctcccacattacataaaacttacagtaaataaatgtgtatgtttttctcttgctagtctctgttatagggttctcccccattaacctagcagtggatgaaaaaagaaaatctcttctcccctaaaaatattcccataagaatatccaattataaataagactaacaataaactccttttaaaatctgagtagaaaaggaccccatggtagcaatgtatgtatgttggactaatttgtaactattctcctaagtgttgaccttaatctttctggtaatgcattttaggattagtatactacaaatgtactttttctccaaaattatacgtcctggatacatttctttatgtagatatgacatacctttcttgcttcaaatatcaataacatgtagtgtaagaagcctccaagagtgtggtctttttaaagctggaactcacatcctttattctatctagtaagccatctctcaggtctcattcttgagaagaaaaaaaaaagctgacaaaatttctacatttaaatttatttttcccttaatgtttcatatcaaaatggaagccatgtttttcatcatttcattcaagacataaaaccttgtgaaaaaccaaagtaatggaggaaatgaggaattgtcgtttagtggatatagagttttagttttgcaagatgaaaaagttctggagaatggttgcacaacagtgtgaaagtatttagcactcctaaactgtgcacttcaaatggttaagatggtgaattttatgttatgtgtattttgctacaattttaaaactttcctaattaaaaaagaagtaatggtgattttctggcaaaaaaaaaaaaaaaa

SEQ ID NO: 57905 - DNA, 1998 bp, Homo Sapiens
agaggtacaggtgggagtggacacgggcaggtcaaccactgtccctgccccatgaccccgacacaggtcagatgacccagatgtggggggccagggcaggagcagttgaggggccaggctatcagctgagtcgaaagttggggacccccagggctgacagtcccaacaagtcactaggggcgggcaggtacatggggtcagccctgcccttccaagctaaaattcaaagatccagccagcctggcttgtcctgtgtgtgtgagcatgcagcagccgctcctgggtgtgggaactgaaaaggcagcagggcacccccttttggccaggaggtggaggtgctggctcaggagggtccaggtctggggagccctgaggacagaaggggagggagcctggtggggcctctgcaggaggcagggctgggctgggtcacacggatggggccatgtggggcagtgcaatggtcactgcatggggccctggccatgacggagaagccagcactaggtgacagaagtcagaggtggcctgagggaattccatggaagaggagtcgaggccgggcgtggtggctcacacctgtaatcccagcactttgggaggccaaagtgagcagatcacctgaggtcaggagttcgagaccagcctggccaacatggtgaaaccccgtctctactaaaaatacaaaaattagctgggcgtgatggcgggtggctatttgggaggctgaggcaggagaatcacctgaaccaggaggtggaggttgcagtgagccatgatcctgccactgcactccagccagggcgacagagcgaatctccatctcaaaaaaagagagtagggaggaaaggcctgggctgggcccttcacaggctctcatcctgtgaggccggagctcagcccagccccaggaggggaattgggaggctcggagcctgggtgtggatgggcccagggccacagggccaggaaggatgaaggctgtggcctttgcttgaggaggcatttctcttggaaggaggtgggcccgggggttctgtgcatgcaggactagaggaggggcaggggcgggcaggagctggggtcaaggacccctcctcccctctgtatgagtggctctggctggccccaggcccaggctggtgggaaacccctcccagccctcactggccccttcttccacaggaaggccaggcccctgaccccagccctgccccaggcccacccacagctgcagactctcaacagccccctggtgggagttccccctcggaggaaccacccccaagcccaggggaggaggctgggctgcaacggttccaggacacaagtcagtacgtgtgtgcagagctgcaggccctggaacaggagcagaggcagatagatgggcgggcggctgaggtggagatgcagctgaggagcctcatggagtcaggtgccaacaagctgcaggaggaggtgctgatccaggagtggttcaccctggtcaacaagaagaacgctctcatccggaggcaggaccagctgcagctgctgtgagtgctggccccgggccaggagagcagaggaactcttagctactttggttagagttcttcactactttcttattcctacagagatctttttgacaaacgattcctcttccatcttactgtttttgtcctaaacaaattgctgtttaaagtataaaactggccaggcacggtgtctcatgcctgtaatcccagcacctggggaggccgaggcaggcggatcatctgaggtcaggagttcaagaccagccaacatggtgaaaccccatctctactaaaaatacaaaaattagccaagtatggtggcacgcgcctgtaatcccagcaacttggaaggctgaggcaggagaatcgcttgaacctgggaggcagaggttgcagtgagccaagatcagaccactaccgccccgcgctggcttgccctcctgttctccagagcaataaagttggacgagactacccc

SEQ ID NO: 57906 - DNA, 393 bp, Homo Sapiens
  misc_feature (341)..(341): n is a, c, g, or t
  misc_feature (357)..(357): n is a, c, g, or t
ttgagacagtgtctcgctctgttgcacaggctggagcacagtagcgccacctcggctcactgcaacctccacctcccaggttcaagcgatttgctgggattacgggtgcataccaacatgccctgctaatttctgtatttttagcagagacagggttttaccatgttggccaggctgttcttgaattcctgacctcaggtgatccgcccacctcgaccacccaaagtgctgggattacaggcgtgagccactgcgcccagcaaattcttacttttcatatgttgaacgtgcatgcaagtggatcctctagttttcttattttctcccactttacaactctntttgtcctcccccggnggagttttctcaactttatcttccaaccctctaaga

SEQ ID NO: 57907 - DNA, 723 bp, Homo Sapiens
  misc_feature (16)..(16): n is a, c, g, or t
  misc_feature (72)..(72): n is a, c, g, or t
  misc_feature (89)..(89): n is a, c, g, or t
  misc_feature (248)..(248): n is a, c, g, or t
  misc_feature (381)..(381): n is a, c, g, or t
  misc_feature (426)..(426): n is a, c, g, or t
  misc_feature (566)..(566): n is a, c, g, or t
  misc_feature (571)..(571): n is a, c, g, or t
  misc_feature (628)..(628): n is a, c, g, or t
  misc_feature (647)..(647): n is a, c, g, or t
  misc_feature (697)..(697): n is a, c, g, or t
  misc_feature (716)..(716): n is a, c, g, or t
  misc_feature (722)..(722): n is a, c, g, or t
ccttttggtcgacgcnatcataagttttttttttttttttttttctcagcatctttaaggcagatgttttangagtctctgtctagtangatctatcatctggcctttcttttagggatagtttctgctgattttgttttccctttaaatggccatattttcctgtctctttgtaggctttttttttttttcttttttttttttgctgaacactggacatgttaagtctaataatgtggtaactctangaaattagattcttcctccccttgccctaggtttgctgtttttgttatttttatttattgttcttgttttgattgttgcaggctgtttctgtgcagaggatcaacccaagatggaaatttaaggtctttccangatcttttttgagctgtacctttccctgagcatgcagtcactgtnctaattttctaaattttcttattttccccatagttgtttttgaatttcctagtcttttaatgtctggctcccaaaaggggaaaaagagaaaaatgaaagaggggggcaattggtgctggccctttaaatactcttggaanatacnttcagctggagggggaaggggccctgtaaacgactggaggggaggctgttgaatacncaaccggcaaggcgtcaancggcacccttcttttggtctggcaccctcatggggggatcaggaacccangccaaatccaagggggatnccctgng

SEQ ID NO: 57908 - DNA, 306 bp, Homo Sapiens
ctgatattacttttttttttcaacggttctatcttctacctttttacttttacagttagactcttccctcaccaccttatttttccagaaacctctacctgcctctgtcctataaagttttcacttcttaaattactacggagtcttcttgctgtttatttctctttatatttctgatatttcttttttttttcaacggttctatcttctacctttttacttttacagttagactcttccctcaccaccttatttttccagaaacctctacctgcctgttttatgactttttattgcccctcctcc

SEQ ID NO: 57909 - DNA, 523 bp, Homo Sapiens
taaagtatttgagtaatagagtaaaacttaatcttaagggatggacaaagccagccttgtggagttggtagtccttgtgtttttcatagcccaagatagccatgtgacctggaacttttaaaaaaaaatttttttttaagagccagagtctcactttgtcacccatgctggagtatagtggtgctatctcggctcactgcaaccattgtctcccaggttcaagcgatactcctgcctcagtctcctgagtagctgggatcacaggtgcacaccaccacgcctggctaatttttttatttttatttttagtaaaggcggggtttcaccatgttggccaggctggtctcaaactcctgacctcaagtgatatgcctgccttgacctcccaaagtgctggggttacaggcatgatgagccaccgcacctggcctgacctgcaacttttatgatctctggtaaaacatgagaaatacttgtaaaaattatgggagcaaagtaaataatttattttttaaaaaaaaaa

SEQ ID NO: 57910 - DNA, 391 bp, Homo Sapiens
caccattcagaacaacagtccaacttcaaattgcttcagtgattatattgttaatatttcctagcttccagaattgaatctcatgaaattcatggaatttggatcaatgtgtgtgggtactgtggtgatccattccctcctgtggactatttctcctttctgaactgaatgcttctttggttttatgtctactcattaatgactacatagtaacccacttctgacaaaggccagtctacactgccaaagtgtttcacttagcatgcctcccagtggaagcagaggtggaatccaaagttttcagttcatgttgctgattcattcaagttactgaagaaatgtccagagactagagactgtggaagttgtttctgttctgtgaaaaaaaaaa

SEQ ID NO: 57911 - DNA, 495 bp, Homo Sapiens
  misc_feature (455)..(455): n is a, c, g, or t
  misc_feature (469)..(469): n is a, c, g, or t
  misc_feature (495)..(495): n is a, c, g, or t
ttttttttttttttttttttttgagacaggatctcactttgtcacccaggctgcagtacagtggcatgaccttggctcactgcaaccgccgccccatgggtcaagcaatcctcccacctcagcctcctgagcagctgggactacaggtacacaccatccgcccggctattctttgtctttctaggagagacacggtttcaccatgttgcccaggctggtctcaaactcctgaggctcaagcaatctgccttccttggcctcccaaagtgccgggattacaggcatgggccagcacgccctgcagccttatctactttcttaattggtctgttgcagtttcatgtaggttaatctcatctgtctacctacccaattgagagacaggaactaaaactatttagagcatctgtatactactacagacttcataggtaattttatacaatactgaaggncaaagtaggatatntgaagcaacgtcagagatagtttatn

SEQ ID NO: 57912 - DNA, 546 bp, Homo Sapiens
caaggttaaagactaaattagtgatttgggagatcaagccaatgggcttgtctaaaacctagtcaaaaaggtcaaagtgataaaaattatgaaataaaatttgatatttggaggctcaagctaagaaagctgctctgtctaaaggaaatacagaggacatggaaggtaagaaagaaatgataaaaagaaaaaaaaaactccaaagttaaggaaaatcttaagccttcaagtagaagggttctatcaagtgctttctaggattattgtgggaaaaagatgttacctagacatatcatggtgaggttggtaaactccagtggtaaagagaaattgctaccctctttcagaggaacaaaagaggttaactacaaagcaactgtaagtaggcatcagacttctcatctattatcataaaaagtagggtaaggtctacaaaatactgtaaaggagtattttgaatttagaatttcttatagagctaagctatggctcgctcatatgtcagggcaaaaaatcatccaggctgaaagtttgtcaaaaaaaaaa

SEQ ID NO: 57913 - DNA, 487 bp, Homo Sapiens
cggcacgagcagatgatttcccatccattgctgaaacccagggctgccccattgtacaacctcagggaataccattttcacgtgactttcctggagcacagcagtgtgactggtgctccctggagctgggcagcacactggcctggctatcccagtattactccccgtactttgctgcatctgctcaatgctgcatttcattccctatcttggttaatggtcccatcaaaaccagaaacctgggagccatccttgattccctccttttcctcactttcctttccaagtctggttagttttctctgccgaaagtggacaacttaccttctctttttcctcatatctaccaccctgatcccttcttgcccactgaaacaattgcaccagcctcctaattgatctcttagctatcgtcttccacatcactgctagagggactgatcagaagggcaattctgaccatgtcagtcgtcattaaaaaaaaaaa

SEQ ID NO: 57914 - DNA, 450 bp, Homo Sapiens
ttgagacggagtctcactctgtcacccaggctggagtgcagtggcgtgatctcggctcaccgcaacctctgcctcccaggttccagcgattctcctgcctcagcctcccaaagttctgggattacaggcgtgagccaccgcgcccggtcaatgcctgcatttttaaggtgaaatattatacagttaagtgttaaacaagtgaagaatctcaacaaaatacatattacctttaaggctctaaatgaccagagagaaagaactgtgaccattaccattaaaacgttcacgtcctggcctatacatttcttttaccgttgccttcaatttccatatattttggttcttcaagttagctggacgttctatgaggtcagggagcaagtgtatatccctaaactgctgagcctcaacactcacaggatgcctaccaacagcatccaactcttttaa

SEQ ID NO: 57915 - DNA, 419 bp, Homo Sapiens
ctttttttttttttttttaccatccatggttagggcaaaagggcaccaagacaccagagtacaaacctgatgatgtcatttttttttttttttttttttttttactttaaaaccttcaaaggctccctttttccaaagataaagtccaacttcctggcatgtatgcaaaggtcttcatgtgcaggtccctgtagattgtactatcaccttaggtgaaaccctgggaaaaccgttctaggaaaagctacttctaaggtggagaggggaggaaagttttaggcaaagggaatatgccactgagtaaagcccagatgacagaagccccatggtatacaggaaaacccaagcagctagatactgtagaacataaaatgtgagggaggaaatagcaaactattgtaatttaaccaactgaaatt

SEQ ID NO: 57916 - DNA, 412 bp, Homo Sapiens
ttttttttttgagaacactggaccatcattaaatgtgtactgtgaagagattaatatgtatgaagggctttaccaaagtccactaaataaacactactcaagtacagactgcaaaccaaaatgtatctgtgttacgacattaattgcaaatagcaagtacggtgctaaagtctacaccaatggaattagatgagtgctatgcacttaattttaaaataaaactagttttcagtaaaatggcttcggtatttttgttttaaatacaaacttgtatatttgcagctctagtgaaccatctcatcatgtaattcagacttggaatcatgattttatttactaaaagccatcaagatgtagaatatagccattagtggcataaaacatccgttcattgcgtattccatactgagca

SEQ ID NO: 57917 - DNA, 482 bp, Homo Sapiens
tttttgagatggagtttcactctgtcgcccaggctggagtgcagtgacgcaatctcagctcactgtaacctctgcctccccggtacaagcaattctcctacctcagcctcctgagtagctgggattacaggcatgcgtcaccacacctggctaatttgaatttttttttagtagagacagggtttctctatgttaggctggtcttgaactcccgacctcaggtgactggcctgccttggcctcccacagtgctgggattgcaggtgtgagccgctgcgcccggcctcgcttcataattctaggagtgtttttggtggataccttgggatttcctacaaagacaacggcgtcatctgtaaacaggcagtttcgtttcttcctttgtgatcgacacgccttttctttccttgtcctgcgtactgcagtgcccagcgcttccagcaccatgccggatccgatggttagagcagacgtcctttctt

SEQ ID NO: 57918 - DNA, 350 bp, Homo Sapiens
tttaaagtagttgcttcatattagttttgttttaatttaaagtgtcatttgctttgattgttcaaaaatgtcttaatatagctgtgtggctttaggtcacatatggatggtttcaaatatgctaaagataccagtaactagggataattatatagtatttgagacataacagccatgcaactagagttttaaaaataactcaagcagtcacgaactttcattttcttgccaacagttccaatattcagtatcaggcctggtcctcctaatctactggagaagagttggttatggcatggcatctaatagtcatctcttcttaatacaaatgataataaatttcactgcta

SEQ ID NO: 57919 - DNA, 1666 bp, Homo Sapiens
ggcacgagggggagttggaaaaagcacatttttttcctccacatttaaaaatgactagaaggtgagagagaaagagagaaagctcacctgcagccggtgaagtcacgcttttgcattccgtttgtaggacaagttgtcagtgtgcgatgatttccataggctttgaaatggggtagcagtttaaacatatcaaatgcttaatgaagtgaggccccatctcatcggtattcagtgtggcactaacattacatacgctaatcctgaaacaataagctataaggagagcctcgctttctgggtttgaaatgaatggagcagtctgaattcttccagttttatctcctgctttaacctggaatgatgccagcatgttgggttttaccctggagaattcatatcatgtgaaaaacttaaatcaggtctgtctgctggtacacgcagtcctaatccgttaaatatttctagctaacaatgcacgtggggctcttcagctctgcatacagtcatgttctgctaagtccatgcaaatataaccacttctgcctgcttttttgagggagggatcagtaatgcctacatggttttacccaaatccctcatgcgacatacaaggctcttggcatatcttaaccctggtggtagctccctatccattctctaggacctggctctcttactgtgagcttgggaaggtttcaaatgagagattgcttctctttcattggtcatttaaaaggaaccacaactcttgactttatcaagttatagaaacttgagcccagagtcccggctgtagaatgtctaaagagaatgccactgaaccccatcattccctacgcccttctgcattcagaaaaattaaaaacattaggacttgtgtgaaccatgtatggggcatttttcttcagagtcaagcactgctgtctgaaaaagaacacttctttccagaaaactctgttttttcagaacgacctctttcattctgctgcctcattcccagaggagtgattttgtatttcccctcatccaaacacggagatgactttttcaggattgtaaaaaggaatgtgtgatcaatcttttatttaatacatatttatgaggtgcctctgtgtgtgaagttaagtgctgggtaaaagggcagtgtagcatcacagtcgcaagcatggattcgagagtccaactgcccgggttgataactgtgtgaggttgtgctgggtacacagtctttctgtgctgtggtttccccttcaggaaaatggggctgttgaccatactgacctcataacgaagtccttggggtctgacacctagcaggtactaagcaagtgttagctgccactgctgccatttctgctcctgctgctctgctgttgatctcattactgttaccttcatctttactattattaggtgctgggaacaaagttgtccaccaaaacaaagcgaaactatacccaccatggttcctgtccttatggagcaccaagtttcctgagggaggcatacactgaataaaagactatagaccaggtatagtggctcatgcttgtaatcccaacgcttttggaagctaagcaggaggatggcttgaggccagctgttcaagaccagcctgggcaacagagcaagtccccatgtcttaaaaaaaaaaaaaaaaaaaaaa

SEQ ID NO: 57920 - DNA, 1586 bp, Homo Sapiens
agcggattgtataatgcagtagccactggatttgcagcagaaacactctgctacagaacaagtgtcttggttcacagcaaagaggacaaagaaaacagcaagttttagggggttgaatcctggattcccctggcaaacaccattctactttccgtctctatgaatttgactactcgaagtacctcatgtgaaatgttggtgccaaatgaacttttctggttcttctgaatatgccactgttgctggagaaatgtcactgctagagaacagaagactattattccaaagggtatttgagactgactgaatcaggtctggaacattattgaaatgagacccacaaaagaagagatactgagtaattcagcatttccagtgacatccttctggctgtgcttcaaagggaagatgacgctagagctggcagcatgaccagcactgtgtaaatcacccagacagacaacaacacaacatccatgaatagatggcagagttagcaagaaaaaatagcttggaggatggaaaaaccccaaaggatactccagctaagaaagtatgggcgcttcccctagtttagaatgcacttcagatggattccaagctagaaggtctatctggaggtgaagtcatgtgacatgaactaatggctagatttctactgaggaagcttggggtccttgtctataagaggatgaagagatcctcctagcttggcggaatactctgctctgatggaagtaccatcctggtccaaacatgaaagaattcccaacatcaagattgattgaaacatattcaatgggatgtaggctggtggcagaaagtagaccctggagaacaggagcacttggtttcaaataaaatacctgcattaaatattcagctttcctgcacctttatcattacatttgatttgcaaagaagatagaagtcttaagtcactgtacaaagagaaagatataaaagtttaaaaagatacaatgactttcccatagctaacaaggagccagcatgggtccaagttttggcatcgatttggggaaaatgctttcaaactctaaaatcttataaagatggggaaaataattactaataaaggcctactacggccttttatatgtgtaactggatcttggttcatgctgagcttaaaatttgatcttctgaatatcagcagaaagactctttctggtgaatacagatcttctgagcaattatcgactgactttgtcattagactgccctttcagaaggtacaaaaaaagaaaaagaaaattactactgtgaagtgaagtctgagcaactgggaagaaatgcaaggtgaaatgaaatggtgaagttgtcagtgacatgaatctttgctcccttcttcatggaatatttctgatctaatagcccctatatttcaaaagatggatataaacatcagatggatatcacaggaaagctggattgctctgcagtgagtgaaacgtggaaaggcctttccccaccaagcagtaggccaaattgtaacagtaagatgtatttgaaataaaatggttcatagatcaaaaaaaaaaaaaaaaagaaaaaaaaaaaaaaaa

SEQ ID NO: 57921 - DNA, 1396 bp, Homo Sapiens
catcttctcttcctcttccccaccgtcctctccccacgccctcttctcctctcactgtcttctccccgcgccttccccacaaccgttttctcccccgttttcttcccctcacaccgttttcttcccatgtcctcccaccgtctcgcagcagcgtctgtcagtcgcaatcttcttcccactttcttctctccccctcccatcgtcttttttccccagcctcttattctccgccatcttcttcccctccccaccttctcgcagcagcgacttcctgccgcgtttttctctccccgcaccctcttctcccctcttccactccccaccgtcttcgaccccgatcgtcttcttgcccacccccttctcgcgctctccaactgcctttcacctagaagcgctccacgcgtgcgcccgcctgtgtccctgcgcctggtgtgtctgtgcgcccagccagccccatgagctgggcccctgagctccgccccaacagccaacaggagacccaggagagtcgctgccagggccatcacggctgccgccgcccccgcccccgccgctacctcagaactgaacagtgttggctgcgggcgaaagacagtggggcccggaagactgcggggagagggggaggaggggacggagagggtgggaaagaccttggaaagtgggatggggagaaaggtggggaagaagacagtggggagaaagtgcagggagaagacagtgtggtagagaagacagtggaggaaaacggtgaggagaaaggagggtggaaaagaagacgatgaggacaaggccgggcgcggtggctcacgcctgtaatcccagcactttgggaggctgatgcgggcggatcacaaggtcaggagttcgagacctgcctgaccaacatgctgaaacccatctctactaaaaatacaaaaaattagctaggcgtggtggcatgtgcctgtagtccagctacttgggaggctgaggcaggaggatcacttgaacctgggaggcagcggttacagtgagccgagatcgcatcactgcactccagcctgggtaacagagcaagactctgtctcaaaaaaaaaaaaaaaaaaaaaaggaaagtcaacaaaatttatgtaaggccagtacaacaaaaactacaaaaaattgctttgggaaattatgaaagaactaaattagtggggagataaaccttgtcatggatcagaagagttgttatgtttaaaaagtcagttcttcgtaaattgatctccagatccaatgcaattctaataaaaattccaaccggcattttggtagaaatttacaagctgattctaccatttatatggtaatgtcaatgatcaagaataataaaatagcaatattataaaagaaaaaaaaaaaaaaaaaaaaaaaa

SEQ ID NO: 57922 - DNA, 899 bp, Homo Sapiens
  misc_feature (193)..(193): n is a, c, g, or t
agaccatatgaatagcagaagttgagcaatttcaaagtaaaactgatatttttatttccaaaggaatttagacattgaaaataattgacatacattaagttttaattcgataatttcttatatatggatgaacaattttggggtttaagcttttaattcctagaaattttatacattaaatctcctgcaattngtcactctggatgttactgtttaaaaaaaaaaaaaaaaaggggttttttccagaaaaatctggctggatatatagggtaagtaagtggtaaacttttccctaattctatttcttagatccctaggtctatgggcaaaaagttgggtttcacggaatttggaactcctaaaccagtacttgtttttttcacacgggtttttggagctggttttcccagaattcaagctggatatcccagggtaaccgtgtcccattctgggctcttataaggggaccctctgtggtgttatcatgtttgtaaagttttttaaaatttttcttttatatatttagacaaactgtgaggtactcagagggacaaaggggggtttcacagttagcaagaaagaagtctgtcgttaagttattaaacttaatgtggtcacctttcaagggaatggaggaatatttgaatcctaaggggtccacaagattagtatcactttgattaactgacttatgaacatatagtgccatgacgcacatcagaggagatagaggggggcccaataaagagtgcaccgtgagccaacacataagggaggtacccaaaatacaaacgcgggcacggagagaagacgacagagacacacgcaatcgcgcatgagacataacaggtgtcacaaaaagagtcacagaaagaaccggggaacaggcgggataaagg

SEQ ID NO: 57923 - DNA, 1222 bp, Homo Sapiens
ggagccgtaacatagtggttataaatctagactctggagtctcaagtgcaaatgtcattggcctctcctccagcctcctcaaggggcactcaatgactggaagtgccctgatatgactgtggttggactgacatgactgccagatggtgggacttggtctggagcagagactacttggaatggtagaggcaaaactcaacagcccctggagctgcgcttgtggtggagctggaccctgattttagctggaccttgtttttagagacagggtttccttctgcagtctcgatctcatggccttgattgatcctcctgccttggcctcccagagtgctgggactacgggtgcatgcaaccacacctggctaattttcttctcttctttcttttcttttttttttttttgatggagtcttgttctgttgcccaggctggagtgcagtggtgccatctcggctcactgcaacctctgcctcccgggttcaatccattctcctgcctcggcctcccaagtagctgggactgcaggtgtgtgccaccgtgcctggctaatttttgtatttttagtggggatgagacttcgccatgttggccaggctggtctcgacctcctgacctcaggtgatccacccgccttggcctcccaaagtgctgggactacaggcacatgcaaccacgtctggctaattttcttgagttttagtagagactgggtctcgttatgttgtccaggctggtcccgagctcctgagttcaatcgatcttcctgccttggtctcccaaagtgctgggcctacaggcgtgagccaccatccccagcccaatttttgtatattttgtagagacacagtcttgctatgttgtccaggctggtctcaaactcctgggctcaagggatcttcttgccttggcctcccggagcacttaattacaggaatgactgcatgtgctgttgtgcctatactttctggagatacgttgttaggaatttatgtagttggccgggcacggtggctcacgcctgtggtcccagcactctgggatgccgaggcgggtggatcacctgaggtcaggagttcgagaccagcctggtcaacatggtgaaaccctgtctctactaataatgctaagatcagaggttgcttgcagtgagccaagatcataccattgcactgcagcctgggcagcagagcgagactctgtctcaaaaaaaaaaaaaaaa

SEQ ID NO: 57924 - DNA, 1067 bp, Homo Sapiens
tggacgctgtgaatcgtggctggcccggttctccgcttctccccatcccctactttcctccctccctccctttccctccctcgtcgactgttgcttgctggtcgcagactccctgacccctccctcacccctccctaacctcggtgccaccggattgcccttcttttcctgttgcccagcccagccctagtgtcagggcgggggcctggagcagcccgaggcactgcagcagaagagagaaaagacaacgacgaccctcagctcgccagtccggtcgctggcttcgccgccgccatggcaatgagacagacgccgctcaccctgctctggccacacgcgacccgtggttgatttggccttcagtggcatcacgccttatgggtatttcttaatccagcgcttgcaaagatggtaaacctatggctaccccagggagatacaggagactggattggaaacatttttgggtcctaaaaggtgctgttttggggtgcaacactgaataaggatgccacccaaaaggcagctaccgcgagcttggcagatttcacagcccaaagttgtgggatgcctgtcttccaggaaatgaatttgatggacccctggggctattaaaacccatttgttcaagactggtggatttctccccgcacgcatagtaatttatttggttaaaccgggggggaccggaataaaccggtttcaccgccgtaattttgaccttgggaagaagacctgtaaggccaaaccccttaaggaaatttaccgggctcatataccttcctggggataacaacaaggccctctgcggctgccacatggagggattaaacagaaattcctttctctggcctgatagaacaaaaacctgctttccgactctttgggcattcttggcctccctattgtgacgcaagagggcacactcctcctaaaattttttaacaatcgcccgggcgctcctcgatcaagggcgaaatactattatcccgcgaaggggagaaaaaaattccggcgctcaataccactttatgcggcgaccgaatcctatatttgggcttttttcc

SEQ ID NO: 57925 - DNA, 879 bp, Homo Sapiens
atccattccatttgaagatgattccattcgagaccattcgatgatgcattcaattcattcgatgacgattccattcaattccgttcaatgattccatttgattccatttgatgttgattccattcgattccattttatgatgattccatgcaattccattagatgatgattcctttcatttccattcgatgatgattccattcgtttccatccgatgatgattccatttgattccgttcaatgattattccattcgagtccattcgatgattccattcgattccattcgtgatgattgcattcgagtccatggattattccattccattccattagatgattccattcgggtccgttcgaagattctcttcgattccattcgataattccgtttttttccgtttggtgttgataccattcgattccattcgatgataattccattcgattctatgcgatgattccattcctttccattagaagatgattccattcgagaccattcgatgattgcattcaattcattcgatgacgattccattcaattcttttcaatgattccattagatttccatttgatgatgattccattcgattccatttgatgatgattccatgcgattccattagatgatgacccctttcatttccattcaatgaggatccctttcggtgcatttgatgatgattccttgatcctttgtgacatccattcatatcatgatgatgtatttgattcttgtgtgttcttcatccttgtctatcctcgctcctcgggatctggtctttcagtgtcctcggtctgggtcctcctccacgagtctggcaggagtttgggcaacccggtgaacccacggggacaggcaggcttggacccgg

SEQ ID NO: 57926 - DNA, 570 bp, Homo Sapiens
tttttttttttttttacttatgctgagatttaaatgacaaagattcatataatccaagagagaagtattatttagagggattcttttaccatgtgatatataataaatgcatccaatgttatacatcaatttaaaaaacaagtaaataactttaaagaaaagataactactggccaggtgcagtggctcacacctgtattcccagcactttgggaggccggggcgggtggatcatgaggtcgggagttggagaccggcctggccaaggtggtgaaaccctgtttctactaaaaatacaaaaattggccgagcgtggtggcaggcgcctgtagtcccagttgctcagtagctgaggcgggagaatcgcttgagcccgggaggcggaggttgcggtgagttgagatcatgccactgcaatctagcctggaggacagagcaaaactttgtctcaatacaaaaagaaaagaaaagataattactttatacttagcttgtcttacccatgagtgacgggctgcatgtggtccaggacagttttgaatgcagttcaacacacatttgtaaactttc

SEQ ID NO: 57927 - DNA, 1018 bp, Homo Sapiens
ctagatcgcgagcgccgccctttttttttttttttgagacggagtcaggctggagtgcagtggtgcaatttcggctcgttgtagcctccgcctctcccaggttcaagtgattctcctgcctcagcctcccaagtagctggaattacaggcgcacaccaccaacccacataatttttgtttttttagtagagatgagttttcaccacgttggccaggctggtctcaaagtcctgacctcatatgatctgcccacctcggcctcccaaggtgctggggtgacaggcatgagccaccacgcctggcctgaaatgccgtttttatcatacgctgcagactaatgcatcctcagtgtcacctcccagcttgatgtgggacaagccaccaagggtgtcctcaccatggccccgctcaggccaccagttggctatgtttgcccctgccaccccaggcacacaggagttcaggagtcctctctggccttgcctttatcctggggcagctgcaggtgacaacctctggaagaggtggtaagaggagccaggacacaggccagtctgagggacacactcctcccacagtcctggagaggggcctgcatgtttctgcacctggagggccgggccagggtggggaagactggggatgggggggaggctggaccctgcaggttcttggacctgtggtcaaccgggaaagccaagtccctgatcttgagcgaggctgcggctggcacccccttgaaataggacagtaaggacctccaacaatgcccattgggcgaaaaaaggccaccgggaacaggggggccacggagtggccccaaacaaaaacccccatctccacctttggcattttccttttccaaggcaaccctggggccctgggacagcttcggagggggaaaaaggcactcaaaaggatacacctcggaccctttgtcctaaaagctgggcaccgggaacaacatgtatcgggcgattaaacaagtgggccggggccacatatgtcccccttcatg

SEQ ID NO: 57928 - DNA, 1711 bp, Homo Sapiens
aaagggaagcgccgccgccgccgccccgctcggtcctccacctgtccgctacgctcgccggggctgcggccgcccgagggactttgaacatgtcggggatcgccctcagcagactcgcccaggagaggaaagcatggaggaaagaccacccatttggtttcgtggctgtcccaacaaaaaatcccgatggcacgatgaacctcatgaactgggagtgcgccattccaggaaagaaagggactccgtgggaaggaggcttgtttaaactacggatgcttttcaaagatgattatccatcttcgccaccaaaatgtaagtagctccctgttcagtgtcctggaagtcggcctgttcctgcggggattggagtcctctccaaagaggcccgtggctgtggccgtggcgccctggtccgggcgatccatggagctgggagggagtgagatcacagatttggaggtcggctttgatccctgatccccgcctcaggctgcagatgcgagtctgtttccagctccaggggtgggcggtgcacgtaatagacttagtctttcatcccagctaattggctgggaagctccagagtcctttgcagggagaggctgtgagatccaggctggagctcctgggctgggagtgcctggaccctcagtggttgttggcgacgaagacaggatttggtgcccacaagaccccagccctggatgggatggacgtgcagaagcgccaccactccgagtctcactggagggtttatcttgccccacctcactgctcttcctgtgggctctcgcagtctctcccacccggggctgcgtctgcagccgggcaggcatagagcaggggagcagcagagaaggcgcgagaagaaagggctgaggccaggttcgacattgagcctacagctaagttagtgatctcagtcagttcagcaaaactcaggagagggaggagagggccgccacgtccctgccgtcccatagctggaaatcggcaggccctttctgtggtgagttccacgcattaacacgtgcccagcacctagacagcgcctggccacggtgaggcgagagtgctgtgtaaaagcttccactgcaattgtcactcaagacacacaagtgttttccacagtggcagtgaccagaggagcttgaggactgctgacagcaccagctggtcgagacttgcttcatttttggattgtcctttgctgtttgattttttttttaaaccatgagcaggtattacttaagatgacttattttaattaagaaaaatataagaatgagacacagtagctgctttcattgattctgttcaaccgttgattggaattccaagcaaatgcagcaagacaagaaaaagaagtcacaacggaagaggtggggaggaaggccaggacaacagctcagtaaagctgaggtgcaaggctgggcacggtggctcacacctggaatcccagcacttttggaggccgaggtgggaggatcacctgaggtgaagaccagcctggacaacatggtgaaaccctgtctctactaaaaaaaacaaacaaacaaacaaaaattagcgggtgtggtggtgggtgcctttaatcccagctgctcgggaggctgaggcaggagaagtgcttgaatccaggaggcgggtccagtgagccgagatcgcgccactacactccagcctgggcagcagggcaagaccctgtctc

SEQ ID NO: 57929 - DNA, 1064 bp, Homo Sapiens
  misc_feature (32)..(32): n is a, c, g, or t
aggaagaggtccggtatcagttaaatgcttanaaagataagggggaccacccacagctggtcgtgagaacagggagacagtgtgtgggggtgggacctcatctgtgtgcctggtatcctgagttttacatgtagatgcattcgcctatttgattcagaaaaataaactttcccaaaatgtgtctgaaccacaagagcatacagtggaagtgctacctctaatctaaccagagcaccttcatggtggaagacacccaccaggtcatacaatgtgaacttttgtatctctgcagtggtttcaaggacaaatagtgtccaatgtattgggccatttttcctgctgtttttatactcaacttctcaaaatgaaaaaagcttttatttttcctttgacttatttgtgttgttcttattttttaaatttttattttttgataatagtctgtaagttagcctttttgggttttttttttttttttttggcttttttttttgtttgtttttttttcttttgacattgcaaccgaaggtcataaggccgctaactccgctgggacagaggcttgagagaactaacggctcggtgccttctccctggtctcagaccatcgtctctgcactgcgaaggcatttggtagcctcaccactgagatactaactagacctagactaggagctttatcaggttctaggagggcccttaggaagactctcaaaggcaaatccctgatcccccgccccaccccttagccctggccttctttccagagcaaaattccttgggggaattttcccaccccacatggaaatccgcgcccacccggaataccctttggtttcccccctcccaattggtagggggccggggcattggacccccccacttgaggttttattataacccggcccgggttccaaatctacctccgccgtcggtatcccgccctttcgacgttgtccccttctgttaccttccggtaccggaccccgcctcctttcttttttcgccggttctctttctttccccgccccctcttttcgttgttcctagtccgcgcggcaccc

SEQ ID NO: 57930 - DNA, 3110 bp, Homo Sapiens
cacaaaataatacctcgaggtacatttccccctgcaatgtaaacccttaactcctctctcctttctgacatcagtggattatcctttttaaaatatgaacatgtaaatagcaggataactttaaaaaacattttctttgctgtgaaagtaaccctaaaatatgttttcttcttttgtatttttttggtttttgtttttaagccatcagaagtttcagatctttactctttcatgtttaagaagaaagagcagaggaggtcgggggagccggtttgcatttgtgttggaggggtgttatctccattgcctcccacacagtgacagcagaccagtatgtaaaccctgtcttggctgggcgcggtggctcacaccagtaatcccagcactttgggaggctgaggcaggcagatcatctgaggtcaggagtttaagaccagcctggccaacatggtgaaaccccgtctctactaaaaaattagccggacgcagtggcgcgcgcctgtggtcccagctgctcgggaggctaaggcaggagaattgcttgaacccgggagacggaggttgcggtgagccgagattgcaccactgcactccagtgtgggcaacagagcaagacttcgactcaaaaacataaaataaacaaaagacacacacacacacaaaaaccctgtcttaaatagctgccatctcttccagcaatctagtgccagggtaagaagtgtctgaatttctctcttccagcagatccatcccctgcagggactccagaatgttctccacacaatacctggagctctcaacctttcttggttcagacacacacatacacaccccttgagtaactcagtatcattttgtagttcacagaaggatgtagtccctggcattttggtttgcactgtagaatccatagccttgtcactttgttatgctctggaaatgtactgatttcttacttgggaggaaacttgtgtaaggagatgtgcaaaccaccctgaaagccatgtgcatcctcacctcttccattaccccctccatgagctcgaagcgacattaagtagagggaaatgcttttaacaaatgctgctcatgtggatctgtcagctattgcttgcctagatttgggcacccatgaagcagggttggaatggatcattttgaattgcttctttgcagacacccccttcgcccccatctttaagataaaccctttactagtcaagaagcccttttcagttggatctcactgatcttgtatagtgacgacttcctttgaaggaagaagcttgattataagtgcatgcatattatccacccaccttctgatttgggcactgttcaccttggaattttatttattttgtttatctggaggccctttttctatcagtctctgatccctcatgggttctgcctgcccttgtatctcttgtacaatgctcccaaagggctttgctgatctctgcacttctttcctgggacactccccccaccaccaccctttgcacacaccagtgaccaaagtgtatgcagtgatctcacagaagacatcaaaaatggtgcatgcaccgtgaatgtgctcacagagacacgtgcacaagattctgcacccttggccttaatctcagtatgacttaaggtgcaggaacatttttaacaggttttaaaaaaacaaaaaacccttctgggaggaaaaaaataaaaagcagatacaacagctcaactgttcccactcctaactctccactatgtgcttataacttcacattctatgccctccccgccacccacctcatccctgttctgcgtaaccaaaaaacagacaacaaaagcaacctgaggagaggtttctggactattttatctgtctccatttagatggagatataaatgctgctttgggttccataatcctagggggctatgtttacatagtaaaatacatcctaccaaatcaggaaacagtgaataatgggagtcacttcacagagacgcaggaggacctggggggcgtagcagaggaggataggtagagaagtaccattttaattatttgtgacttgtggcttccttcctcctctcctcctccctccacgtctctctttgccccctttagacagaaggtgcagaaaagggcatcaaaaagaggctggattttttaaaaggcagctttccaactttgcacacaaacaggtaacaggaaggtacagcaaaaatcctctcatctgaaacactgtcagcagaaacaaaacctgtaaaaatgactaatcagctgcacatattgatgctctctgcaagttacctttaagtgtttttttttcttatacttgaagttgcttttacgatattattttggtggctttcttttctctctttgatgggcaatagaggaagtagataatgggatttaaggacgcctgggggagaaaagggaggatgtggcattgtcttttttttttttttttttttttttttagcatagaggtttaatcaaactcccatatgttgaaattgctcctcatattactggttttacatggacacagaaactaggcactttagaggtgcacttgcatggcaggctgggcccccttttctatattttattttccttttagtatagtggtacttaaaatcactggttcacttaaaaaaacaaacaataaaatgttaaactctactaatgtacaaataagctgaaaagttgcattttatgtgtattttttgccatagcaggtactgtatttctcatgctggatttcaaaaaaaaaaaaaaaaaagtatcaaaaacaaaaaaaactaaagggtggtgttttattggattgtgacaggttgagtaataaggaattaagtcgtcgtcatttcattaaaactgagagatgatgtaatgcatatataagagttttctgaagggttttttttgggcttttaaacagcttatttttgtttttgtttagtttttttattttattttattttggaaagatatgattgtattatgtgcaactcagttgcttacattataactacaaaatatttttgggttcctggaaaaaaaaaaaaagaaaaagactataatgtgttggctgctaaaaaaaaaaaaaaaaaaa

SEQ ID NO: 57931 - DNA, 398 bp, Homo Sapiens
  misc_feature (376)..(376): n is a, c, g, or t
cttatcggagggcaggcctgtgggggacctgcagaaactcgtaaagacgacagccgaggcctccacaaaaaggaccaggttctccagaaaagtgagcagctaaaactgtttctaagaaactcaactgcatccagaacaaagattaagatgatttataaaaatgctaaaacacccagcacgcaacatggtaaaattcgcaatgcctcaggcatcaacccgagagtaccaggcccacaggaaggcagcataataggaccccaaacaaggaggaaaagcagcctcctgaaaccgaccctgatatcagaaccagcagacatgggcactcagcagttcttacaactgaatcccaatctgcaaaagtttagtagagacatgngagacgtataggggaccccaag

SEQ ID NO: 57932 - DNA, 1738 bp, Homo Sapiens
gggtgggtgcctgatgagcggtgcttccctcatatgatatgtgggcaccctgaagctctcacgtaatggttctgctgtgccgggttgtgacccagctgtccttggtaggctctcctgtttaatgagcaactgctatatgccaggccctgttctagaaacagatgaggcccctgttcccatggaacttagatctgagtatgtggacagagtgagtaggttgccagataatgtcagaggtaagaaaaaagccaggcagaggacagcagtgctggtttagacaagggttggcaaggcctccctgataaggggacgtatttgcgcagacacggaagcagtctgatggaaggcttgccctgtagggacctggggtgcagactgagctgggagggctcttggcttgctccaatgaggtaggggcgaagagagggcagaatggcccccgtgctggtccagatgtggccagcgccagatcgtatagagccgtggaggcacggtaaggacttggggtttgagggagatgagggccctgagcaggggtgccatgatctagcctctgctccagaaggatctgtctggctgccatgtgggggacacggagtggagcaaagacgggagcccagtgagagtcgagggagaggtgacctcagcttgggctgcggtgcaggccatgggactggcaggaggtggctggggttacgctgtcttttctaacattcagcattggctcaggggccaggtcagggctcacagactgttgctataaagggctgggtggctttcttccccacagctactcagcctaatgccattgcagagcacatgtagccatggacaacacaaggggcgtatccgtgttccaggacagccatattgacaggaataggcaggaggccagatttggtcctcaggctgtaatttcttggccccttgtctagggagaggtaaacgaggggaggagagatcagtcaaggatgacgtgagggtttgctgggagcaccaggaatcctggagaaggtagtggcaagagggtgcagcaagctcagctgggcggggatcaagtctgaggacttaatgtctcctctgatctccagacccataagggagatgctgagtagacaactggggcttatgggtctggagttcagaggagagatcgggaaggtgtccatttggagtcatccacgcagagatgtgtgaaggctgctcaatgattttgaggtttaaagaaaaaaagagatgtgaaaccaggggccctgatgaggctgcccaggtggtaaggaagacagaagagaagccatgggacagctgagcccgggcaccctcaagccttggaggcatgaagtttggtggggatctggcaaagaacacctgggagcagccagcgggcagcagaccccagagtagcagggaagacaagcacttcaaagaggcagcgtcagccaggggcagtggctcagctgtaatcctagcactttgggaggccaaggatggcagatcacctgaggttaggggttcgagactagcctggccaacatggtgaaaccctgtctctactaaaaataaaaaattagccaggcattggtggtatgtgcctgtaatcccagctactcgagaggctgaggcaggagaatctcttgaacccgggaggcagaggttgcagtgagccgagatcatgccattgcactccagcctgggcaacaagagcgaaactccgtctcaaaaaaaaaaaaaaaaaaaa

SEQ ID NO: 57933 - DNA, 432 bp, Homo Sapiens
  misc_feature (1)..(1): n is a, c, g, or t
ngtccaaataaagagacaataaaaacattattctctcttttttggatggaatactgcgtgaaatggttatccatacaaagatactttatgtagaatagaaaaaggaggccgggtgcagtggctcacacatgtaatcctagtgctttgggaggctaagccgcgcagcactgattgaggccaggagttcatgatcagcctgggcaatgaagtgagaccccgtctctacaaaaaaatatgaaaaaattagcgaggtgtggtgacacatgcctgtagtcccagctactcaagaggctgaggtagaggatcacttgagcctacgagttcaaggctgcagtgagctatgataactccactgcactgccgcctggatgacacagagagaccgtttctaaattaattaattaacaattttaaaaaaaaaaaagcggccgg

SEQ ID NO: 57934 - DNA, 1533 bp, Homo Sapiens
ggggcagccattataaatctctgtacctgcttgctgcttttctacctcattgttagccacacccagtttgaaacagatgaggtatgctatttcataactagtacatcttttaataagcattttttattgtgattaaatatgcatatcgtaaaattcaccactttaaccagtttttaagtgttcaattctgtggcattaagtatattcatactattgtgcaaccaccaccaccatccgtctacagaactcttcatcttcccaaactgaaattatgtattcattaaacaataaccacccattacctcctctctcctcagcctctggtaaccagcattcagtctctatgcattgactactctagatatctaaatggattcattcttatttcatttaccataatgtcttcaaagttcattcatgttgtagcatgtattagaatttctttcctcttaaaggccaaatatgccgtagtatgtaaataccgtattttgtttatcagttcatccattaatggacactgggttgcttctgctttttggctattgtgaataatgcttctgtgaacgtgggtatacaaataactgtttgagtcctaataggcttgttatttttgagtgcacagatctgtatattcgcaattgaaatagggaaagtctttatattcatataaagataatttataatacaataagtcctcaatgttgttgataggttctgggaaactgcaagtttaagaaaaacaacatataatgaaatcaattttaccataggtgaactgatataaataagagttaagtccctatggcatatatttctggttacaaaaacactaccaaatttctaataaagacccaaaacacttctaaaattaaacattgagattaatatgagctttatatacatttaaaaaggataaaaacaagtaagaattggctggacatggtggcttacgcctgtaatctcaacactgggaagtcgaggtgggcagatggcttgacctcaggagttcggaaccagcctgggtaatatggtgaaacccgtctctacagaaaaattcaaaaattagccagaggtggtggcttgcacctgtagtcccagctactcgggagcctgatgtgggaggatcccttgagcctgggaggtcgaggctgcagtgagccatgatcacgctactgcactccagtctgggcaacagagcaaaatcctatctcaaaaaatatatatatattatccagccccaaatgtttatggggttgttattgataaaccctgcattaaacaatcccacagtcggtgctgcggtgagccgtgatggtaccactgcattccagcctgggtgacagaatgagaccctgtctcaaaaaaaaaagtaaaaattatttacccaatatttggcgaatcagtgagtgacagcagttgtagtgctagtgggttaaatcaaggaataactgttgggaagtgaaaattttaaggagcacctcctaccaccatgcagttcaaaaccaaaaaaaaaaaaaaaaaaaaaaaaaaaaa

SEQ ID NO: 57935 - DNA, 3494 bp, Homo Sapiens
attttccagtgagagaccgcggagtgttgggtcgtgtagaagtgactgaacccagaaggtggagacgagacgttgtcccgactgcacagaggctgctctgcagctccttaaaggcgctaggcgtgacccgcaccaaggccgggatcgggaccaccgtgcccgggtacctgcactgctcgccccctcctttcgaccccgctttccccacccagtcggatggcggcggccgcgctgaggcccccggctcagggcactgtgacctttgaagatgtggctgtgaacttttcccaggaggaatggagtctccttagtgaggctcagagatgcctttatcatgacgtgatgctggagaacctgacacttatatcttctctagggaaatgatgtcactctgaaactcaggctggaatacactggcatggtcatacctcactgcggcctcaaactcctgggctcaagtgatcctcctgcctcagcctcccgagtacctgagattagcccagagcagtgtgacctttgaagacgtggctgtaaacttttccctggaggaatggagtcttcttaatgaggctcagggatgcctgtaccatgatgtgatgctggagaccttgacacttatatcctccctggcagggcactgtgacctttgaagatgtggctgtgaacttttcccaggaggagtggtgtcttcttagtgaggctcagaggtgcttgtaccgtgatgtgatgctagagaacctggctctcatatcctcgctgggttgttggtgtggatcaaaagatgaggaggcaccttgtaagcagagaatttctgtacaaagagagtctcagagcaggactcctagggcaggtgtttctcctaagaaggctcacccctgtgaaatgcgtggcctcatcttggaggatgtttttcactttgctgaccaccaggaaactcatcacaagcagaagctgaacaggagtggagcatgtggaaaaaacttggatgacactgcataccttcatcagcaccagaagcagcatattggagagaaattctacagaaagagtgtcagagaagcatcgtttgtaaagaaacgtaagctcagggtgtcacaggagccatttgtcttccgcgagtttgggaaggacgttctgcccagttcaggattgtgccaagaagaagctgctgtagagaagacagacagtgaaactatgcatggcccaccctttcaggagggaaaaactaattacagttgtggaaaacgcacaaaagccttcagcaccaaacactcagttattccacaccagaaacttttcactagagatggatgttatgtgtgcagtgattgtggaaaatcctttagcagatatgtcagcttcagtaatcatcagcgagatcacactgcaaaaggaccttatgattgtggagagtgtgggaaatcttatagtcgaaagagcagccttattcaacatcagcgagtccacactggacagacagcttatccctgtgaggagtgcgggaaatcttttagtcagaagggcagccttattagccatcagcttgttcacactggagaagggccttatgagtgtagagaatgtgggaaatcttttggtcaaaagggtaacctcattcaacatcagcaaggtcacactggagagagagcttatcactgtggggaatgtgggaaatcttttcgtcagaagttctgctttattaaccatcagcgtgttcacactggagaaaggccttacaagtgtggagaatgtgggaaatcttttggtcaaaagggcaacctcgttcaccatcagcgaggtcatactggagaaaggccctatgagtgcaaggaatgtgggaaatcatttaggtacagatcccacctcactgaacaccagagacttcacactgaggaaagaccttacaattgtagggaatgtgggaaattatttaacaggaagtatcatcttctggttcatgagagagttcacactggagaaaggccatatgcgtgtgaggtatgtgggaaattatttggcaataagcacagcgtgactatacatcagaggattcacactggagaaaggccgtatgaatgcagtgaatgtgggaaatcatttctttccagctctgcgcttcatgttcataaaagagttcattctggacaaaagccttataagtgcagtgaatgtggaaaatccttttctgaatgttccagtctcattaaacacaggagaattcacactggagaaaggccttatgaatgcaccaaatgtggaaaaacatttcagcgaagctctaccctccttcatcatcagagttcacacaggagaaaggccttatgagtgcagtgaatatgggaaatcgtttgctgaagcatcccgtctcgttaaacacaggagagttcatactggagaaaggccttatgagtgctgtcaatgtggaaaacatcagaatgtctgctgtcctcggtcttaagcgacttcgtgttgagatggagtcttgttctgtcacccaggctggagtgcagtggtgcagtcttggctcgctgcaacttgggcctcctgggttcatgcagtcctcctgcctcagcctcctgagtagctgggattatgagtacacaccaccacgcccagctaatttttgtgtttttagtggagatggggttttaccgtgttggccaggctggtctcaaactcctgacctcaagtgatccacccaccttgactcccaaagtgctgaaattacaggcatgagcctctgcacctggccttcattcttttcgtattgcttagaatatgacatgctgaaccaggcatggtggctcatgcttgtaaacctgatgctttgggaggacaaggtggttcattggaggccaggagttagagatcagcctgggcaacatggccagacctcctctctacaaaaagaaaaaagaatgacatgcttcttgtttttgtctgttataaatgaaactgctatatttgaatgcagttgttcatgtaggtatgtttcactatggtaatatggtggtgtgcagtgcctgagtcacgtgatagattaaagtacaactcttttttgggacggagtctcactctgtcacccaggcgggagttaggtggcatgatttcggctcactgcaacctctgcctcccgagttcaactgattcttctgcctcggcctcccgagtagcagggattaccggtgtgcaccaccatgcctggataacttttttttttatttctattagcaatggggtttcaccatgctggccaggcttgttatgaactgacctcaagtgatccacccaccttgactcccaaagtgctgaaattacaggcatgagcctctgcacctggccttcattcttttcgtattgcttagaatatgacatgctgaaccaggcatggtggctcatgcttgtaaacctgatgctttgggaggacaaggtggttcattggaggccaggagttagagatcagcctgggcaacatggccagacctcctctctac

SEQ ID NO: 57936 - DNA, 1780 bp, Homo Sapiens
aaaaaacttacgggcctcacctgctagcgagaagatagcttggccgggcggctgatctcaccttgtaattctgacactgtgtctcccgggcttgtcggcttcatgacttgtgcccaaagtttgatttctcgcagaccaggaggacccattggacccccgggctggctgcagggcccacacctgggttagacctcgcacagggacgctgctgccactgtaataaagcgtgcctacacgcttctgaaactggtgtaggaacaacctcagttctgtgaaaggcggacgcagcaggacagaatctccgtggacatctgtctggaggagcaattttactgcgacattttaaagaaacaaatttaattgatttccaagttatttgagacagagtctcgctctgtcaccaggctgtacagtgccgtggcctgtctcggctcactgcaacctccacctcctgggttcaagcgattcttatgcctcagcctcccaagtatctgggactacaggcatgcgccaccacgcccagctgatttttgtatttttagtagagacggggtttcaccatgttgaccaggatggtctcaatctcttgacctcgttatccggctgcctcctcctcccaaagtgctgggattacaggcgtgagccaccatgcctggccacatctacttttttaaatgtgtcattatatttgtgatattgtcatgatgttttctacttatattttattcaaaaattttatactttaagttcttacctttaggtctttgatgcatttttatttgtttatggtgtagggtaaatgttcaacttcatccttttgcttgtggatatccattttttcccagcaccaattgttataaagacagtcctttgcccattgaacggtctttgtatccccatcaaaaattatttgaccatatgctgctttatactgttccagtgtccatatgtgtgtctctttgccagtaccacactattttggaactttgtattaagctttggaatgaataagtgtacattttgtaacactggacttctttttcaagataattttgactcattggggtcccttgagattccatatgaaatttaggtaggatttttctatttctgcaaaatagaattttttgctttttttgttactcccgacgtattttattcttttcagtgctattgtaaatgtgcttgtttgcttagttttgttttctaattattcatcattactgtatagaaacacaagtgatatttgcatgttaattttgtatgctgctactatgctgaatttattagttgtaatactttttgtgtggatctgtgaaatctctagagctttccacataaaattatattatctgtaggctagagtaattttacctctacatttccaatttggatagtttgtttctttttaattcttaatttgactagaacttccaacactatgtggaatagaaatagcaaaagcagacacctttgccttgttcctgagcttagagcagaagctttttgtctttcaccctggagtacattgtttgatgtggttttttaatgtgtggatttcacaatggtagtattttagttttaaaattcctacttttttgagtgttttcaccctgaaaagattttgaatttcataaaatacttttctctgcatccatgaggtgatcaatgtttcttttattttgttaatgtgtacacattgatcaatttttatatgttaaaaaattcatgttttaagatatccttgcattctaagaataaattgcacttggtcgtggtg

SEQ ID NO: 57937 - DNA, 502 bp, Homo Sapiens
caggactcgattttaaggacccaggaggtggggcagaagagaggactgtgtgcctttaacgagagggtgcctgcttcgtgctataaagccaaagccattaaaaatagatttcttttaaaaaaaaaaaaaaaaaaaaaaaaaaaaaaaaaaaaaaaaaaaaaaaaaaaaaaaaaaaaaaaaaaaaaaaaaaaaaaaaagacagaacagagacagaaaaaaaaaaaaaaaagagacggggggggggcgccaatagaacgtcccgtccgggagcaacgacagagcgcgcgcgctttgtagacacaggaggcggcccacacagaggagggaggaagagataccaacagagaagagacgagcagcgcggcgcgccagtaaagaacgcgccgcgggggagcggagggaagaaaagctgtgccgcgggcgggatagctggggagaagggagacacacaccatcagggggagggggagacaaaggagggagaacacagcacacggagagg

SEQ ID NO: 57938 - DNA, 911 bp, Homo Sapiens
agcggagagccagaccgtgagtcggggatccgggtaggagggtcgggccgcgccggggcctggctgaatgctgcaggccccggggcccaaggtgtggccgcggtggggcgggaagtagggagcgcttcggggagtgggattctgagggctgtttgcttagcgatctgtatcgctaggctggtgggtttctgggtcgcagtgtgttcaggtgttcgtttaccacatccacttgccaagttgccaatgatcgcgtgtttctcgcaccttggttgctaaggtccctcgctgcaaagaacataagttgccccggtcccgcttgctatgggtacctgattgttagaggcaaccagaggatgctgagggacccctgctgacccctcctatggcttccccttgttccgcatcctctcctaaacctaccgcctccactgcaccactgcacctccctcctaaacctgcctcccagccaaagcgtctcttcccttctcttttcctttctaaacttccctctgccttgtaaatctaaccctccccgcacacacactcacacactgtcgtgtccttcctaactcctcctgagtgttccttcatgccctgaatcccctaggtaggaggagcgaggatcgcttgacgcccacggactttgacggctgccagtgagctatgatcgccactattgcacctccaatctgggtgacatgagcgagaccctttctctaccaagtaccccgaaaccacagcagtcaggggcccaaaacacaggcttcctgcttgtactcccactacttgtggcacgcaaggaggttggatcgctgagccccaggagttcatcaacacggctgggacaacgccctagattcccccgtcccttaattactctccaagacttctgccctcactacaccacttcc

SEQ ID NO: 57939 - DNA, 433 bp, Homo Sapiens
tttttttttttttttttttttttttgtttttgttgttgttgctttttatttcagcagcttttggggtagcagtggttttggttacatgcatgaactgtggtgaaggctgagattttagtgcatctatcactggagtagtatacactgtacacaatatgtagatttttatccctcacctcctctaatcctgccccttccaagtccatcatatcacactgaatgatagaggcaatttattttgagtaatacatccctccttaagacagatttcaaactttgtaacccccaacagaaacttaaaaagactagggcaaataacccccaacagaaacttttaaagactagggcaaagagactgaatctaaagattacctttcattcactttttcattccggttcagaatattcccattccccaacttctcctttcttt

SEQ ID NO: 57940 - DNA, 5785 bp, Homo Sapiens
agcccccactcatctgaggatgaccattggggcacggagcctgccccaggcccctgggctttgtgcccagggctctcttctccctccctgtcagggtttccagacccctcgtgggcacccaggatggacggcaggcacagagctggagggtgtggcctgagatgggccatccggacgactcgggcctctgggctcaccagagtgctgaatgaaggccggagggcgagagtgggaaggatggcatcacccaccctgccggtggcccctatggtcctgcggctcctgctgcttctgggttaccctgggcccagggtgcaggcgcccttggggaggtgcacacgggaggctcaggccctccttggacattcctgaacgcccccatgcatccctgcagctccttccagaaggttctctcgatcctgtctggctcctcgggggtgtgtgggaaaccaggccagggtctcccggttgttggctggggtggggtcctgccttcgccccttagcattcaccccctaccccttttcaccatgtaaaaccctgtgggccctgggccctggatgctctgcgcccgaggacctgggttctgccatcacctgggcagtgtggggggcatatagggggaacatggggtgcctgatgtagtgcctgtgtttgaccttgtttaggtgaagagcaccctttccagcttatgttttgtatcatgaccgggaaaggtacgaaacaagtgtgtcggggcccagatgatttgatggctctacgggccgagtatgggacacaggatagcttggccctgggtcaggtattagtcagtccttgctggcacctgggcagggacacatccgtggatggggcctggccaggtggcctctgaggtcctcgtgtccactggaaggctgtgtcctctgttgtagtcactgacttgctggacctgggtgggagctcacccacctgtggatgggccagggagctcctggaatcactagaaagatgaactttttttgccttctaaatgtatgaaaagatgggaaatgataggaaaataagtggaagtcagatctattcaggaaaatgacttcccagggaagagctggggtgcctccaaacccagaatcctcggtttctagaagcaaggctgaccgaggtgggcagcattctttgggaccttgagtgatgaagtagttacttaagcagagtgtttctcatgtgaagccaggcagtctaggacactaggaatcatttcagcgtgggggagacgcagacactgtgcttgcccagggtgctgcattcatctgaaatgccggtggctaccagctctttgtcacggttcctccgtggtctccttgaatgctgtcagattcagggcccgtgtgggcagcggcagcctcgttcccagtcgtgtttagggaatggggtcagagaagtacttgctaaagcttcctgtgtgcacgtgtaattgtgtgtgcatgtgtgttaaataaatgtatttcaactcgaaatacacgtttcgtggccatcagtctagggatggctagaatttagtcactaaatgaaactaagccgcaccgtcaccaataatgtgaacatgattaaaaaccacactcagttcttattcatttacctacaagtccagaaacttttagaacttatttcaccattaaaataaatagttttttaaaaaatatacaacaataaggaaaaatttgaaagcctcttgcccctccatcccaggcctgacagagtggcttccacaaagaaagaggcagaagccagggctgtctgtgcctgcagggcgctgttgggctcacagatgacccagactcccccgtaatggagccgcggacccacagcgagccacttgcaccaggcttagccaagctgacaggccagcggagtaaggaatgttccctaccattgtccagaaaatgtaacgagggtgaaggtgtgccaagcagactccccgtgtcagccctgaggcgactgccatcgctttcagaaacctgactaccaacctggatgaaaaccgactgcttggtcatggccatgcagttagaaaacacagcagcaatcctcagatgagtgtggccgtatttgtgttactcaagctgctttgtcatctgcatttgaagaaacgtggtgagcctcctgtgtgtgcccatgtggcagtgggcacctctgccccctgcaaaggctgtctaagaacacagagcctgcagtacaggccctgcctcctgacatgccccaggccggctggaagaaagcgcgggactgtcctattgacgtggggaggggacggctggactctgtgatgctcactgtgttctctgctgggccatgtggctccccacagagaccctgggtgcccagtcattcgcgttctcctatgtgtgtgtatatatattatatatacatgtatttactaactttagaaagcccccaagggggccttgtttctgcttggacagtcagcgtccatagcgtgtcattcctaagctccattaaggagattcagaagcaagcagttacccctggagtctgcacgctgggcacaagggtcacaccttcgttgagagctcctgaccccaggagccgagggcaggacacggtagtgtttacaggacctggcaaaggggcactgccttgtgtgtgaggttttttcaccagtcagtcccttttaaaaacagcatatcttttgaagaacaagaagtttacgcaggcataagcaactcactttgcacgtggagctttcaggacgtttcatgtctgttacgttatagcctctatcctcatgggggctctgagttcagcagggcctgagctgttaatctgctttttcaaattattaataatgaaagtaacaccatgccaccacctggtatcatttcatgctttctatgtgcctggtgtttacacggcttatctcatttaatcttcccagcatgtaataaaaatattgcaacaggtactgctcctgtgtggactccttcccccgagctcacactgcttgaggccttcccagctctgggctttgtgtcctgtgtggacttcttccccgagctcacactgcttgaggcattctagctctgggctttgtgaatatcctgcttttatcctcatttataggtaagaaagctgactcagagaggttaagcagctggtctgaggtcaactgcttacgggtcggggagctgggcctgcacacaggggtctgatgcagagctggtcctatctgctttataagctgtggctcacagggcactccaggggctcgagaggacctggcgggctgagatgaagactggtgaggcctgggaggcaggtgcttgactgaggtgggaagtgggaccttggtgccaagcattcccagggccacggggcaggcctgtagggtctggtgggtatctggggtcccggagaagcccttggcacggggcttcatgagagcataggcgagtgccgcgccctgcagttgagcacgggggatgcagctgtcgcagtcgcttttgaagagtgaggggtgaggcctgcagttgctgcccgacgttgtttacaagtgagcaagttttacaaaaaacatggacagcatcagggctgacttgaattttttacttgaggcagcagctcaacctgttggtttcctcaattgtgaattaaaaaaaaaaaaagaaagaaagaaaacagagaaagctgacaacgtaacattgatgagaggattcttaagggagaacaagccacaggctgtcccgagaaaggagcggggagatcgaggaagcacgctgccgtgtcttgttcgtggggtgcttgtgacgctctcgcaggatgccctgtgggccacaccacgagtgctcggtggcgactgcagaagggtgagggacgtttcccttcacaccagacggcgggtcttgatggcagaggaaccaggcatcagaggaggacaagtcaatccgggagcgtagataaaaaggaagcgaaacttatttcacattgtcaagctgtcggggattccagggaccttgtcctccaggcctgtccctgtgccctcctgtccccaggcctgagcagccgggtgtgggatgggaacaggccagggccaggtgcctcacgccctgaggctggagtcaggctctgttgccactttgaatccaggggcccaccctgaaccctgagctgggcttctgttcagtacgcggaggtgatgacctctcccacccggggggggtttgaggactcccgaggtggcaggggtgacgcccagcccagcatgcagagtgcccaggcagtgcccacacctttcctctccctgccaaggtgctccgggcctgagcctgtgtggccccctgcttggggctgtcaccacaatgccattccccgcacgcccagcaagtccctcctatgggtgagagcctaacttgagagactcttttggggaggagtaagatgacctgcccttctcaagagtgagcagttcttagatgactgccttgagcagcgatggttcttcctgcaggggtgcgcccacgaaacgctctgcgtgaagcacattggtgccatgctcaggcccagggagagtggagggtgctgtgctcttggactgggtcctggctcgagggttgaggggctgggccatgtccacaaaaagtcactggatggctgggctgctcccactgtgtcgctggaagaggggcagcgcccgctgcagtgtttggagtgcttggtcatggccccacgtggattctccttcctgggggaagctgttccgtcccaggttttcagctaacttatctgagttttgatgaagagagcaaggggttttgctaatctggattcctgtggaagggcctcctctctctgctcgtgttttatagcttggcaactctagtgctagttctgcaatattcgaatttgagtagccagaagaatttgctgccagggtggccttgcccttgactttgaaatgaactcacccgagacttcagcttgatgcctcctttggctaatgctgggttctgggctttggccgccgcctgcctgtccatcacaaggggccatgttctccaatcaggacagagttctaagcatttcacagtaaagcctgcaggagttaggttttctgttcttgacagactgagaatgatactgagaatgttttctgattgatttggtgagctgtctgtttatagcatcattagagattattttccatggctaggaattattcttgacctcacagtaaaggactctgaatcccccaccccctgcctgttttttttgttgttgttgtgtttttttgtttgtttgttttaaagaaaagacttgtaccatcagtcttaggcgtaatctccttggcagtagtgaggagcaaggcatctgatggagaaacaaagcatggtaaggtttttaccattcaggaatcacaccgcagtagcattgtagtatttgatcacaatttactcttactttttttcataaagaaagaaataggcctacagtggctctcacttgtaatcccagcactttgggaggctgaggcaggaggattgcttgaggccagaagtttgagaccaatctggacaacataggaacacctcctctctacagaaaagattaaaaacattagctgggcatggtggtatgcgtctgtagtcccagctgttcaggaagctgaggtgggaggatccttcgagctaggaggtcgaggctgcagtgagccatgtcataccgctgcactccagcctgggtgacagaggggagaccctgtttcaagagagaaaaacaaaaaaaaaaa

SEQ ID NO: 57941 - DNA, 397 bp, Homo Sapiens
  misc_feature (256)..(256): n is a, c, g, or t
  misc_feature (263)..(263): n is a, c, g, or t
  misc_feature (299)..(299): n is a, c, g, or t
  misc_feature (350)..(350): n is a, c, g, or t
ttttttttttttttttttttttgtacttcagtgtacatttttattcatagttgaaaagaatagtctattactgctaacttactgtaaatttacttagaatcaaagggtccagagagacataaaaaatgtatgtagtttctgttaaataacactttctgatcactttcaaatatgaatataatatacaggcattatatgcacaaaaatgtaaataggtaattgtgaaagcaagtcttgttatcagtttgtataaggnaaaaagncatttattttttcacagggctaccaacatcatatanggataggctcctggatagggctttgactttttcaattaattcatctcatangtcaaacatctgtagggaaaaggaggtttaattttaccggtggaagg

SEQ ID NO: 57942 - DNA, 678 bp, Homo Sapiens
  misc_feature (531)..(533): n is a, c, g, or t
  misc_feature (539)..(539): n is a, c, g, or t
  misc_feature (547)..(554): n is a, c, g, or t
gaaaacgtttctatagattttggatttccttctgatagctaaaatttgtttctgtataacagagtagtgccctataagccagttcagtgcacattaaatggctgttcttagaattatgaatctgaggcttatgcagtgaggctctagctctctggagtcagttggtcaagtgggattcctgaggactgagcaaacacacacagagcaggattttgtcctaagttttcttagggatcctatccaaaaacaccattacttgaatttcccagcttccttttacagggagacttccttgctatgtgtactcccacctcggtatgtcaaatcattttctcagaggaagtacagcataaaataataaccagcatttgtagagcacttcttgtgggccttcttgggcaaatagacattctcatggaatgctctaaaattgttaagttcttgcacttgctctcaagtcatttataatctaattgctggtcttcctggtatgaacaaagatgtttgcttgtaataaattcctaccccttnnnaaaaanaaaaatannnnnnnnaactcgagggggggccccggaccccaaattcgcccttttggggagtcttattaccatttcatgggccgcggttttaaaacgtcgggactggaaaaaacccgggcgttccccaattaaatcgctt

SEQ ID NO: 57943 - DNA, 2948 bp, Homo Sapiens
aatatgttgtacacacacccctgagtttaaaacagcaaggctgagaataagatcttcagcaggcacaagggtaaaggaaagagatacctgtttccagtatatcacgatgttagtttgcttaactaagtcccatttaacatttaggggatcaagatttgggatgttttcatttttattgaagaaatacttgacaaatattttgaaggcctaatgtttgtatgggctatgaaatctgctatggtaaatgcaaagtatgggacccaagaaatgtataatctgtttgggaggacaggacatgagaattcaaacaagaatataaggctacgcatgactaagtacttaaggggtggcatggacagcagtgaggtagggttttggagaagagaaagatggattggagctaaaattattaggcaaaacttcatagaggctggcattgaagtggcaggtggataagtgggaggtaggtaaaggagaatgactcccaattatggcttagtgcttccattaaaccaattctacataacacatttattgtgctataatcaggagttggaatacgtaaatcttcaattcagaaagacagttcatatcaatattggaaactaaagtcctaaagaaggctggtgtttgtttattgtgggtaacctctggcttgtcagatttcatcccacttgacttccttctcttcccttccttagcagtctgttcaccatcagtaacttctactaaatgttcactaatttttaacaaccttgcacatagagagtgagatttaagttaactgtttttgttttagaattctgtaaatgttaaatagaagagaggcatgaaatcatttctgataaaaatagaagttaaatctgtgttaaagggttttgtggcccctttctccctagctctgtctctcagctgaataggttgtgtcagggagtgacaacgcagtggtgtgttggtgctatctgtgttgagtgaccggcaaaagaccacaaaaggaaatctttagtttcccctccaagtcttgttctttacatgagagcataggaagcctccagaagacttgcatgatcctagtattgagtcctcttctatgcatctatcaaagaaaatgagagaatttcagaggggctgggattatttatttatttatttatttattttagagatggggttttgccatgttgcccaggccattcttgaactcctagactcaggcaatcctcccacctcggcctcccaaaatgctagaattataggcatgagccaccatgctcggcctggaattcttatttataacccagtgacacaagactgtaataaaactattaatagataataatcaacctcatcatttggtcagtttctcttgatgcaaggccagcaaataaaaactttgtaaccacttaaaacaaacaaaacaaaaacaaagcttccttcactcagaaggaaagtctgcctatgaaagccttcacccatttattccccaccacccccctccatgcacaccttacctactttccatattatccactcatccactggggaatgagtatcactcatgatgaacaataatggattcagacccagccttagtggagtttattccccagcaagtctagttccgattgtcttttaaggcctgtcttcatgaattctttcctagcctttagctagaattaatcttatccttcttcataatgctaaagcaagaatcttgattttctattaatattatattatcaaccatgtcctgtgttgtatcatagctactttgtacatatctttttccaccaatagatcctgaatttcctagtgtcttcatatcatccttacacatttaagtgctcattatggttgaattggattttttttcctcacttgaaaaggcgtttttcaaccctttagctaagtgccagcacaagttagatcgtgtgacaaagaatatgtagaaagggcattgtaaacaaaagagaaagttggaaagttgcctagagagcatggcaaagtgcttggaatggttggcaccctgggtttaaatgacggagtcataggaaagaagtccagataggtaagcatggggctggtgacaaagaactgagctttacagatgaggaagatgagacacatagatgtcatttgatcagcccaaataataaaggaattagaacccctcacctgattatccacaccacaggcccagcaccctcacgtaagctcggacagtgattttatgctaccatgccaattcccagggcaattggctgggaaaagatgaagagagtgacagagagtgtctatgacactaatgtctgtgtggttcggccacattattcctctctttgtagtgatcgtgcaacttgaagaaaggcaagagcaataggaagcaaacaaccaagaagcttaggtgtgttgaagacaacattcagcactgatctgtggtgtgctgtagtggccaatctgagtccccagttagtgtgaaatagactagcctgtgaattacactctgaagcaaatgccaagagttgccaattttgccatttgcttggctctttaccttggatttcatagaaccaatattttaaatggtacctgggctaaaataatcagcaaaggtattgagcagataagttatcaaaaactacaggccaggcatggtggctcatgcttgtaatcccggcactttgggaggtggaggtgggcggatcacctgaggtcaggagtttgacaccagcctggccagcatgatggaaccccgtctctactaaaaatacaaaaattagccaggcgtggtggtgggtgcctgtgatcccagctactcgggaggccgaggcaggagaatagcttcaacccgggaggcggaggttgcagtgagctgagatctcaccactgcactccagcctgagtgagacagagtgagactccatcttaaaaaaaaaaaaaaaaaaaaa

SEQ ID NO: 57944 - DNA, 2518 bp, Homo Sapiens
ttatcattctaaccccatctggcattccatccctccatttatccatcttcccacttacccatcttctccatccagcactccgttcatcagtccgtctctccctccatatttccatctgtccattcatccactcattttgccatccatacatattcacccagccatctcccaatccatcgacataccccatccctccctcactggactctccggggtcttagtactatgatacttcagagacaattccatgctgatacgggggagatcaattttggggctctgggataagtctgtcccacatctgtctgatttcccttggcatccttcccgtcagttcctcttgaatatcccagttcttgtacccactcacatacctcagatcccttcactcctccccgcagtttgcagcctctacaattcatccacatgctccctcccccagcaaaataattcaggtcgtggagacaaaaggcttttatgttaggttctgtctgcccccttgttccagcagtggtatgcccagtgagaggcacaatttaaacggtttctttggtgatgatattagctactttcatcaaatacttagcctcttgtgctttagcacattatttatgtaagctcccctaggattctctgaagcaccctggtgtcctggctgtgaattcaagtcccatctttacttatttggtgtgggtcctccctctgagccggttttctcatctacaaaatgaagacaacagtacttccctcctgggatcattgaaagatttagggagcatatccttccacttcccaaacatatttgaacctctgacttgcttaggagcatcattcaaatcacagatcccccagtatctagtcccaacctattgaatcaggatccccagggaaggaggagcttgggaatctgattttttttttttttttttagataaagtctcactctgtcacccaggcttgagtgcagtggcaaaatcttggctcattgcaacctccacctcctgggttcaagcaattctcatgcctcagcttcccgacatagctgggattataggcgtgcaccaccatgcccagctaatttttcgttgttgttgttgttgttttgtttttgagacagagtctcgctctgttgcccaggctggagtacagtggcacgatcttggctcactgcaagctccgcttcccggattcacgccattctcctgcctcagcctcccgagtagctgggaccacaggtgcccgccaccacgcccggctaatttttttggtatttttagtagagacggggttttaccatgttagccaggatggtctcgatctcctgacctcgtgatcctcccgcctcggcctcccaaagtgctggcattacaggcgtgagccatcattcctggctgggaatccgaattttttttttttttggacggagtttcgctcttgttgcccaggctggagttcagtggcatgatctcggctcgctgcaacctctgcctcccaggttcaagtgattctcctgcctctagctgggattgcaggcgcccacgaccacgcccagctaatttttgtattttgtagtggagacgggatttcgccatattggccaggccatagtggtcttggactcctgacctcaggtggtccgcccgcctcggcctcccaaagtgttgggtttacaggcgtgagctaccataccctgcccaggaatctgaatttttagcaatcagttagcagcaaataagctgagatttcctgggtactaagcacatactatgagcattacagccgctttatataagctcgttcactgtcctcattacattcctaatatgcaagtgagcatgttttttaatcctcagtctagaggtgaggaaactgaggcaggcacagagaggctaagggatttgcctagtcgcacagctaggaaggtgcagcactgagactcgaatccacacagcttggcttaagtctaccattaaatttgcctgtcctggccgggtgcggtggctcacgcctgtaatcccagcacttcgtgaggccgaggcgggtggatcacttgaggtgaggagttcgagaccacaccagcctggccaacatggtgaaatcccgtctttactaagaatgcaaaaaattggctgggcgtggtggtgggtgccggtagtcctagctactcaggaggctgaggcaggagaatcacttgaacctgggaggtggaggttgcagtgagccgagattgcgccactagactccagcctgagagacgagcaaaactgtctcaaaaaaaataaaatgaaatacataaataaatgtgcctatcctgtgccgggtgctgttcttgccagtggggatacatgagagaacactgccttgcccgcatgaggcttgtggcctggtactgtgcacacctcaggggattctgataattagctgagcacagttgccagcacagggcctggctcaataaatattagctgctggcttctgctcaaaaaaaaaaaaaaaaaaaaaaaaaaaaaaaaaaaag

SEQ ID NO: 57945 - DNA, 1213 bp, Homo Sapiens
agaaggtacttgcttctctttctcctgccaaagcatgaccttataattgtaagtttccggaggcctccccagccatgcggaactttttcctaaaattcccttttccactggtgtgtggtgcaagatgaggcacattttccatggatggtgaacagagggaggagccttttgatcacaaccaggtcaccccacttctaagccactgtgcctccagccccacaagactaaggagagagagcgcagcgtggtggagagtgagctgtgctgggaccattgtttccgtaacctcgttttctgtgtccagctgacacaccttcaaagtggcatcaggtcctaaactgtagcttgcaatgtgcctgtttccagaaaccaaggtgaaagtgctttagagtcccttcccagcttttttctggaaatgcatgtttctctgaactctgagtcccaagaaaaatcacttgagacaccaagaaaatgggggaagtgctaaaattgtgtgggaattcaagcttaacaataaacatcaagacatttttgataaaaatgaatccactgacatcggggaggagcaagagaacagcacgctgacactgggtcagaggctaagaccgacatttctgggaaccactcccggaagggcacagaggagacgctttcagcctctcatcagccagcctggcctgtagctgctgcacgttatgagtgtgttcctggcatgactgcttctaacaaagaaatgctgaggcagtgtcacgctggtgtctgtcctccttacagaatgcctgaacagttccattgactcaaagtgaagatcaaaagaaccaaatgacagcaatagccaagtgtaatcatcagtaaccctgtgttctatccacagttaaaagaatattggcagagaaacagccttggtgttccagcaggagtgaagaggaacaggaaaacgagtggcagtagccctgaaacagccacttctggtggttgccactcacctgaggatgtggggtcttgccatttgcccaggctggtgtcaaactcctcaagtaatccttctgcctcggcctcctaaagtgccgggattataggcctgagccactacacacagcccggagtttttaaaaaatactcaattaaaatgcttcatttaagtgtatgtctctaagaaaatttaataattgattaaatattgttgaatagactgaaaaaaaaaaaaaaaaaa

SEQ ID NO: 57946 - DNA, 6121 bp, Homo Sapiens
gacaggacagaggaagttgccctgaagcaactgattgtcattgttattcagggctcgctgtcaaccaggaccttccaggaactggctctgggccaagagcagtagaaatcactgggtggtccgcacagctcgcgggcatctaacctgcttcaaggctcagggctaaaagggagccagggcccttcctggaggcgggaacccaagtgggaggcagagcgcctgggcccgctcctcgatctgctgagtgacgaccctgtacaagtcatttctcttccgagagcttcagtttcctcacgtgccaagcggacgggttggaagttggtctttgccagctctgacaccttacactagcattgcagttggctgaaccttgtgtcaaccatccattccaggagccagctatctgagattccaacaatgtctcacccatcttggctgccacccaaaagcactggtgagcccctcggccatgtgcctgcacggatggagaccacccattcctttgggaaccccagcatttcagtgtctacacaacagccacccaaaaagtttgccccggtagttgctccaaaacctaagtacaacccatacaaacaacctggaggtgagggtgattttcttccacccccacctccacctctagatgattccagtgcccttccatctatctctggaaactttcctcctccaccacctcttgatgaagaggctttcaaagtacaggggaatcccggaggcaagacacttgaggagaggcgctccagcctggacgctgagattgactccttgaccagcatcttggctgaccttgagtgcagctccccctataagcctcggcctccacagagctccactggttcaacagcctctcctccagtttcgaccccagtcacaggacacaagagaatggtcatcccgaaccaaccccctctaacagcaaccaagaagtctacattgaaaccacagcctgcaccccaggctggacccatccctgtggctccaatcggaacactcaaaccccagcctcagccagtcccagcctcctacaccacggcctccacttcttcaaggcctacctttaatgtgcaggtgaagtcagcccagcccagccctcattatatggctgccccctcatcaggacaaatttatggctcagggccccagggctataacactcagccagttcctgtctctgggcagtgtccacctccttcaacacggggaggcatggattatgcctacattccaccaccaggacttcagccggagcctgggtatgggtatgcccccaaccagggacgctattatgaaggctactatgcagcagggccaggctatgggggcagaaatgactctgatcctacctatggtcaacaaggtcacccaaatacctggaaacgggaaccagggtacactcctcctggagcagggaaccagaaccctcctgggatgtatccagtcactggtcccaagaagacctatatcacagatcctgtttcagccccctgtgcgccaccattgcagccaaagggtggccattcagggcaactggggccttcgtcagttgccccttcattccgcccagaggatgagcttgagcacctgaccaaaaagatgctgtatgacatggaaaatccacctgctgacgaatactttggtgagtggggcctagagctgacttctgaagtaactatcttgctctgatttccttccttagtaattggaactattatcagctccactggtagagtatttgagtccagatgcatgagagttgatatacatccccgcacaactaagtaattgtaggatttgcatttgcaagactgccatagatgtgatgtctacttagcttatactaaaatttcagtggtccttagggtttccttagatacaaattttattgttgagacttattttttaccagtctgggcaacatggggagaccctgtctccattaaaaatacaaaaattagctgagtgtggtggcatgtgcctgcagtcccagctactcggaaggctgaggctggagaatcacctgagcctgggaggtcgaggctgcagtgagctgtggctcagtgagctgtggttgtgccactgcactccagcctggacaacagagtgagaccctgtttttttgttttttgtttttgtttttgttttttgttttaaaaaagaagacattttttgacaacttattagcttcccattaggcagaaataggatttctgtgtatgttcccatttctcactggtctaaagattcaagtaaaaaatgtggaattggatattgtctgatatccaatttccagattgtactcttaatttttttttctatctcagttgaagaaatgatgttttctttgtagttttaattttcccctcttcaaacttgttaataactaggaatggttaatccttccaatccatgaatataatgcaaatttatgaattatatgccgattgtgaggttctgtggacgcataacctgtcctcagtgaggttaaaattgttcagaaagaggtaagacaagcatacaaataattactagtctaggtagaaagtgataaaagacatgagaaggcttaggtcaattgttgcaaattttatttttattttattttattttatttatttttgagacagagccttgctctgtcacccaggctagagtatactggcgtgatcttggctcactgcaacctccacctccggattttgagcaattctcctgcctcagcctcccgagtagctgggattacaggtgcccaccgccacacctggctagtttttgtatttttagtagagacgaggtttcgccatgttggccaggccggtcttgaactcctgacctcaggtgatccacccgcctcagcctcccaaagtgctgggattacaggtgtgagccactgcgcccggccagaagttttaaaagctccatttattaggagcatccggaatactttggtaaagaattggtggcacttgaatctgagccctttaaaccagtgcctttcacattttctgtggtagaagaccattttcctcccaatctgttggagaccagtatttttgttgagtcagttaaaattaattactagggaaataaaagacacaaaataaaatggaagatgaaattttatcattattagagttaactgttaacgaattactcttttaaatttttatactagtttctaaatattaatcctttgttcctgtatttatctcatccagggtgataagcatttcttagacacccatccatggaccactttttgagtggcactgctttaaggacaaatagagaaacgacatttggggaacagtattagtaaaggcacaaagatggggaaattgcacaggatttttgcttcttcaaatattttctattttcatgtcttttttgcccctatatgggaatatgtaatgacaggtcaactgaccacaccagtccaaaaacacacagtagatgaagtaggaggtattaggatatgaaaaccctggcttttatttgtgttggggtggcagtttagcttagctaaaagagcaaaaagagtgggaatgaaacatctggttgtggtctcttctctgtccctcgctggccaagcaatactggcatgtcacccatctgcctgagccccatttcccacctcactatatcaacggttggggcaaatgttctctagcatttctttcaacagtaataagttcaatgtacaaacatccttaatctaaagtataacaataaagctaaacataaattgatggagattaacaacaatgcatggagaacagtaaaacaaaacatagaaaatccacgaaggtttctagttacatcaaaatacacaaaaagtttattaatgctcttgtcattgccatgtgaggagggtttataatggggtctaaaatacattttttaaaagtgaaaaataaggtctctgtatttaggtcctattaaaaaggaaaagctgacttaccaagtatatatgcttcaaatatcatagcaacaaaatatattgccacaaaaaaaaactgaacatagatgctaattgcatgaatgaatatatattgaacactctgggaaacagatataaattattacctttcccttcaagaactgtccaagctctactacttagtagcttagaaaacttgaacaagtattattccctctaaaccttcatttttgttttgttttatctgtaatatgggaataataactagcttatactgttgttttaagaaatggatgaaatatttatacaaagcacttagccaagttcttggcatgtagaatatgctcaatacaatactcaaggttctcccatgctcttggggcttatagtttatttaagacataagatatgctcgttaaaaatccattaataatgctcaatttaagtttaagttcctagcaacaatagaacgtatgtcactggtaagtaatcattgccaaatggggatgaataaccatttgagaatttggaaaaatggctaacttttattgagtgcttatgatatggcagcactatattttatttacattataggaattaactcatttcactcttataggaaaacataaccctgtgaaatagatactattatcattttcagattttgaaattaaggcacagaaatattaatttgcctaatgtcaacagctaatacattgcagaactgaattagaatgcagatctgtacatttacacaccacactgtaaaagatggggaaagctagccaggctacatatttagaagagtgtttatggtggagattagctttggacagatgggaaataagagatgagcattctcttctaggtacacagaattaacaaaatataagttgaggccaggattatttaaagaaaatttacgttatgtagaaaacaaaaaaaaagtgcctatggtaatattcaggctgctctgctaggtggtggtgggggtagatgtgggtcttacctttgaagttcttatagtctaataggatatgtgtacagagttatggtgttataagcacaaggcagaaagtgacaagtgacttaatcaatgttcaccaagtgttctttgagaattcagaaaaaggaaagagaaaatcaagagagagaaatggaaaagtatttatggaatacttagcctttgagtaagtctttaaaattgtgctaattgagatttggaagtaggaagatagtagagaagtgaagtcatttctcatgaggggagtttctgacataacagggaataaaaccactggagtgaagtgtccacgtgagaagtagcaaatattgggaaataaggttcaagtagtaggttaggaccaatctagggaaggctgtcaatgtccggctaaaggctaagaacgttattgtctataatgagcccttgcacattgagatcacatgccatgagaactgctctgtggatagtggttaaaaacatgcactccagagccaggatgcacttcttaccagcaagatgaaatcaagaggcaaaggactagtgaaaagaactgtcctttattgttccgtgctttaaacatttctcaagcaccttctctgtgcctgctactgtgctgggtgttcaggacacccaaatgcagaggctctgccctcatggggctcacgggttcctaggaaggacaagagagtcacagatgtcaaggattttagtgcagatattagcactgtgttgggtgtgactgagctgctatgtgagagtccataagtctgcctgaggatgagcggaaagaatacatagcagtgtgtttgcatcagcagggcctgacccaagagcgataaagtcttctcttcctttctgtcagagttttacctttggcctattctggactgcaaatagcattgccaagcacttcccttaaataacttctcttttttgcaggactatcctctcagccctgccaaaaccccatcacctactctttctttactactttgcctatttaatgctggaatttttatttaaactgtagctgatttactgaaggtaattaagtgctttcatgctgtagatctcctgctagactacaggctgtacttgggagtgagagtgaaccaaatgtaaataaatgatgtccacagaaaaaaaaaaaaaaaaca

SEQ ID NO: 57947 - DNA, 1797 bp, Homo Sapiens
acccttcactgctctgtgtcctcagcgtgtgtggcttcgtgacctgaagatactgggaaatccatagctaagatgccaggaccccctgaaagcctagacatggtgagagtgctgggtccgacatcacgagagaggggaaggagttgctcggaaccggtgggaagtggctgtggcgggactcaggcctccccgcagtcagctccacaatctgctccctgagttctccttgcccagctcggcctcagtctccttcagccgtaagttggcggctgcgccaacagccggggccccgggcgtcctgtctcttccctgcactgtgactgtgccctgcctggagtcctctctggcagttctgcacccgcagcgccgcgtctttctcagattgtgcggggaccacgggagggtcatcaggggagaatcctgacttggggtgcgggttcatgaatgggaagagctttggtccgtggggttcccagttgctattttctcctattaaaaatttatgggcgtcactgcaaaaatattaaagaatgtaatcaaagagtggttctagaattgtagagcacccagctatggtttgtagtttgtggtctgtgggagaggcttgaaggaaagtcttttataaaatgcatgatgaagaaaccaaatttactaattggttaggtacagttacatggtttcttaatatgtgcgttaaaggtgaaaatttcctggttatgtaatcagagcttaattggcagtttacagttgctgaagcctgaattttgtttctctgaatgtagtaattaaaaataatgcacctgagttagattttttttttaaagtaagaattcagggactagaaatacctcagtctaattgcctgccacttaattattttcacactccacagggaactgattttctgctgtatttttcacctgtgtcccaagcagagtcttggaaccaatcccccatttctccggcctcactctggcttgcagtaagataatttccagtttcctctgacgttcctaaatgccaccttttcctccctaattcacattatcgcctatttgtcttttactgtacttttttataccatattttaattatttttttggcaaagcattaaatggttaaatggtgcatttaaagagatttgttatctgtttgtaaatatttcccatgaaaagaaggcaaataataataccctgacactgcattgtagtaaatctctgtctcttttgctttcatcttgtctaggcacagagatgttaccagaatgtttttgggtcgaagttctcctttggaaaatctatggggtgatgtgtcctcagccaccctttggttttttcctggtcatgggtttcagtactatctggggataaaccaagataactgccatggttatgttagctagagtgtccattggatctcagcttctggtttattttctcccataagatgacctgaggtatggagtgtatcctctcaagggagcaagtggatattctggggctgaggggaatcttccggtgtactcttattttgaaacgggtaaccctttgaaatgttaaaattgccttccctcaaccaggcttccatttcttggagacaaattgctggtcagccaatcagatgctggtaatgaggggaaaacacagaaataatttctgccccctggattctctaaggggacagaaaaatagtgaaattaatatagtaaaagaaaaagagtaaaaaaaaaaaagtgaaaaatttgtggcccaaaaaatagtatcccaaaaaaaaaaaaaaaaaaaaaaaaaaaaaaaa

SEQ ID NO: 57948 - DNA, 221 bp, Homo Sapiens
ctaccaatataaaaaacaaagaattcagttggtttctttctagagggaaaatttgttgtgagtatagtactgggcatcacatgctgcttccctttgtggctttgaataaacccttattttcttgtccaaaaaaaaaaaaaaaaaaaaaaaaaaaaaaaaaaaaaaaaaaaaaaaaaaaaaaaaaaaaaaaaaaaaaaagtactctgcgttgttaccactag

SEQ ID NO: 57949 - DNA, 631 bp, Homo Sapiens
tattcttcacccaccccttcccctgccattgtatttcccatctgtttcaaggagtttcaacaatttacattgcatcgtatgcagtaggtactgctttttcagaaagacctggaaaacatacctgctatgaatattttgttcagatgtagccatttacctggctctcaagttgtctttgtggagagggtcttagacaaaaatcttccttgtatttacttgggttaagtgaagtccaaattcttacagtatgctatttcaggatttctgatattaaaaaagaaaaaacaaaatctttatatctcttattaacacttcccccaagaagggttgtgctgttatttattttctattataagaaaagttcattctttaagtagtttcttttacctctaatctaatttcataccaaatacctgatcaatagaaatgatatatttaagcagcaaagattcctaatccatcattatgaaaagtgtcagcatacttagtagtgaacagataaagtcaatttgaatataattccactttgtttttagagactaaattaagattcaattaacattatcctatgaattctgaatgtgataatgtgattcaaacagtcaaattttattaagctcttagtaactca

SEQ ID NO: 57950 - DNA, 2122 bp, Homo Sapiens
aaaatggcggcttcaatatcagtcccactgagcatgaaattcatttacttaaataaaatctgaatctcagcccaaacctgggagattcaaaacctgagagcggtcttaccaaagacgcccgtatgtctggtgaagtcagttggatgcaagcagtttgtgctggtaccagggccccagctactgatgaagtggcaggagtccacagaagcctacttcgaagttcccggggcttccaggggagattgacgagattcctggggaggcgattcatgacagctgagttccttttggaggatccgtcttcaggcagtctgatcccccaggaaagcagctggaaaacaagagcatgtgaaggaagcgcagcagctcctcgccagccagacagccagccccgcaccgcaggagtcgacatgcacggcagcctagacgccatcagttaaacttatatgtaggcttgttgaggaaaacgactttcaaacacaaggcaaaagaaaaacatgaaaccaagggttccaacattcatcatccagtttcagagacacccttgaaggaatgctacagcctgtttcttacccattcaaaccagtcgctctgctgcatacccacatcacaggaggccctcagccccgacacacaggctcactcagcccagggacatcagcacctgtgccagctccgcaaggtatccaccatgcggccagaactgaggcccagcaatagctgaaatgtcctttaaattaacatgtacaacacacaacccccaagagctgacatccccaaagccccaccacaaatagctgactcctacttatacctgcaggagcaggtactgacctctgcaattctaaaccgtccactttgggcaaaattcatcaagctatggatatgaaaaaaggcccccaaggatatgattcatagtccagcgtttgagtgagcactccagtcagaacgaactctgcattgtgaacatctgaacagggtggaaacagacactttagttagagatccactgctgtgcgtgcacacatactcacacaggaaaagaaaatgagtttctcagtgaccgaacgctgaatgtgatacagggcaatgacggactcgctggcggactccactctacccaccgagttctgcttgtgctccatgagcttccggaaagatggctgcttggataacacctttcctcctgcacactctacgattgccttcatagtggaaagacttgggcagattccagtaaagaaaagttctctagagatgtgctgtggttcacaggaggaagacctccagtggcaatgtccaagaaggaagccaagagtgtaccttaaagagtggagaaacgtgtgcccgttttaaggattcttccaagctgaaagagaaaagtacttctgcctcagcatctcggagaatgtagttctgctcatctggaaaacagaacagcacatactctgaaaagtgtggacacgtgaagtgtggcaagtgtgacccacaaaattctcgcccatattcagcgtatggaccagtttgctgactgctgggcaggagcaaccacatcatgacagaaatgcagggatctgttcaccaacggccagaaatacaaaatcaatccctgagtcaaccagcagatagaaaggctgctttttaggtgaaaggagaaaaagaatgtctaaaatttggaaaaacaaaaaatgatgaattaaaaaaggatcaaaaaaagtactgttacacatgagatggtatatttgaagtgttactttcaaagctgatatgccttctgaagaacttgtgtgagatcaccaagaatagttaatgtttatgatagagaaaacaccaccgggcgcggtggctcacgcctataatcccagcactttgggaggccgaggtgggcggatctcttgaggtcaggagttcaagaccagcctggccaacatggtgaaaccctgtctctactaaaaaatacaaaaaaatttagccaggcgtcgtcgtggtgggcgcctgcagtcccagctactagggaggctgaggcaggagaatggcttgaacccaggaggcagaggttgtagtaagccaatggcaccactctactccagcctgagcaacagactgggtgagactctgtctt

SEQ ID NO: 57951 - DNA, 1941 bp, Homo Sapiens
gttttgcgtgggaggcggtcccgggatttcaggggtctaccggctctcttatggcgaatgcaacccgaagagagagtgagctgtatcttcagagttgtctccgtctttccaagaacagaacaaaatgaacaagggtattgtgctcacaaaccagaggtgatcttcaggctggaacaaggagaagaaccatggagactggaggaagaattcccaagccagagctttccaggctcctcttggctatggtggtttcccagactttccttgttttggttgaccttgacagtttggaggaatcctggtgagaagtctggacagctgatcacctgaaagagaggagccaagaaaatcaatctaaacatttgtgggaagttgtattcatcaataatgaaatgctgactaaggaacaaggcccctgaggtgttcatgcactgatcctggaccttggattaaacccttgcagtgctggaagaagaggactctgcactgcctgccacaccaggactggaagatcaatggccttcccttcttccaaactaccttcccatgaggtggggatggtggtcacatctccaacactggcgtgctgtggaagagacatcagcattctctgcaacaaatttggaaacagcctaaagagacgtttctacttcaaagagatgcactgaggaagtgcactggcactgctggggactcacctggggcccagggctgaggcttctcgtgtccttggagctgctgtcctcccgaggagcgtccacactgcagccagctcagcctcaggtgtcctatctggttttgaaaccaaatctaagtgggaaaagaagattcaagttttatccgatttagtctacataattttaagtatctatttgagctcaacaccaagaatcacttccttctctgtcccatctgtggtctccaaaggaaaggtccctgggttaggagacactggctagcatcctaaagccagagctggccgatgggtgtgtgtccactcttccttcacctcttccccaccctacagttgtttttgtctcatgctcacttgctctttctgcctccctctcactctttaggtctcacaaaggctttggtcaaggactgactgactttccttggctctctgtcatctccccataatcaaaggcatttcataacacacaatccatgtgaagggacctctgatcaaaattcacttaaagaggagctcactaattaccagtacttactgctgagcctggaatcattcgtatataccccagagttcattcattccagacacagtactagataaggagactcctatgagccaaaaacctaactctgaatagactgtgactgtcataatcaaaccctgtggctgcctccttcttactggagggcatagaggaatgcagatttttgtttgtttgttttgagacagagtgtcgctgcaatgcccaggctgaagtacaatggtgcggtctcggctcactgcaacctctgcctcccgggttcaagcaattctcctgccttagcctcctgagtagctgggattacaggcatgcaccatcatgccctggctaatttttgtattttgtgtagagacggggtttcaccatgttggccaggctggtcttgaactcctgaccttgggtgatccacctgcctcggcctcctaaagtgctgagattacaggcgtgagccaccatgctcagccaggaatgtgcttttaatcatttcttagtgtttcatgtggggacttgataactcacaataaggattctatcctaaaagacaagcaatacctgttgacctgctcttatgtcccaggcagtttgtaaaactgtttcatctattctctcaatatgtcacttcaaatatgatcaggaaagaagtcttaaacatggctggaaatgtgggggcaacaaatacattagtgaacaccctggcggatcc

SEQ ID NO: 57952 - DNA, 505 bp, Homo Sapiens
  misc_feature (447)..(447): n is a, c, g, or t
tttttaaaccaaccaaaaatatgtcttattttggatgttctatatgttcttacattctctcaggtcttttgtgtcattatgaacacaattctaacaagcttgattattttatttccattcacatattacaggcaacaagctgaaaaagtagaacggggtgtagagagacaggacaaagtacagatttagggcttgaagtgcccctgaccagtcgacagcaaccacatggaataatgactcatgtgcattaatgatcacactaaatgatatttgtttttttacctagtccttcaactgacagcttaaagaacttcaggttgttctgattcttgagcctcctctacagcttcagagaggactttcattttattttggatcaaatgctccacaactagttgaaactggaattaaattttatatgaagttcctagatgatttaaagctgtnagaagaagaataatgaatcataagaaaacttgctgctacagatatcaaaaaggaatgt

SEQ ID NO: 57953 - DNA, 3438 bp, Homo Sapiens
agcgggtgtgatgagacggtggggagccgcctctgccggcaacagggagactgagggaggagacaggcccagatgcacccctgtggagggaatgggaatgtggaacaggagccactgggagaccttgcgggaaggagactgagacccagcttgtctgtgaaagaggacggtgtgcgcgaatggggaagccgtgtgagcctgtgcatcagttgagattaggctcagccgtgagcaacataaacccccaggaacagcggctgaggccgtggcaaaacagcctgtttcattcttcccagtgttatctgagtctggaagccagtcagggctggtgtgacagccccgctatcccctgggatccaggggctccctccccaccctcagtgctgagcacaggatgtctgcccaggggtgctctgccgtctctcagcgcattcccccagtgcagctgaaccagagcagccttccctctggagacacaggtggatcccagtcagacagcatggctgggatgggcacagggaggaattgagtatctggacaagggctacggaggggagccaggacaagcatgaagatcactggactcagagtcaggaggtctaggcttctggccctggctctgccactgtgtgactcatgaaggttacttccctgctggaacctcactgggccatgaactagatgatcccctaaaccttctagatgccaaaatagcagctgtagcactatcagcctgcaggagcccagctgcaggcaaggccgagaagaaagagtgtctgcacattggaggccagtgggttgatggaggccctagagcattcattcgttcctccagctactaagcattgagccccagctgtgcgacagaccccagggtcaccatgtgaataggctagagtcgctgctcttgagccagaggcaggtcacagagggcttggatgactaactgcctgggcagaaggtgctccatgaggacagagaccatctgactggggcactgagatccaaggcactctcacaacctcaggcagagtctgattcagctccaaaccacaggtccctcatgtcaccccaggctcaaacccaccagtgacttccagagaggcacaagaggaagcctcccactcctcagcctggttcagaccctgcgtcctgcttgtgtcctgaccccttgccagcctcatcagcactcacgacccttcccctcctcccctagtacattcccaccgcttttctcagagaactcttccatgctgttgttcattcacccttcatgtattccttatcagatgtttattgagcacctgctgtgttccagggggcagggatgcacttcaagcaagccacttttcctggctcaagaagttgagtctggaaagaaagacaagtaaagaggtcagcaaaaacacagtgggagtaaacagtgggatttgtgctctagaggcagcgactgggattggccaactctgcagaagggctggtgagggcagcactgggagggcagtcagaggagggtcgtttgtgagctgtgccctgcacacaaggcacagctgagacagctgagcacagggcatcccggcagaagaacctgctcacagaaaggcctaggggtgacacagcatcgctcattctgggaactacaagctctccggttcagtgcatgggaagtgcaacagttgctgtgagcagggacctgggatgccaggctctggggttaggctttctggtgaggacaaagggagcccttgaagggcattcggccactcgggtgatagtagcatggagggatgattgggtgggggcactgggagactcatgcctggctgtcttctgtaaatgcctcattgctggaaagccctccatcctttaactgtcaagggccaatgaggagtccctcactgtgcgaagtcttccctccctcatgccacccccagccccaaccttaaggggacaacgagcactccctcatccaccctttacctccattgcacttggagtaaacctcaatcctaggcctattgtttgctgatttgagttgtcagaagtcagcctcctccaccatcccctggaaaacaggaatctgtgtcttggccaaggccactcccctgcccaggtgtttgtgaaggccctgccccatgtcctgctaatcagtgctctcccactgattggctgattacttgcaagccccagaggagtcacctgacctgtctaggccataggtacatctagaagagaacaatctcaactcctgggtcttcaggagtggagtagatttcaggtggagcaaggcagacatagagccaggaattgcagccacaagagagaaactgaaagttcagcccactgtgttctgaaacctttcactcatttattccctgcaacagtcccttgaggtagatactatcattttattcagcttgccaatgtggaaactatggtacagagaggttaagtaaatcccttcaaggttatgtggccagcagaggcaaagccaggatctgaacatgggtaacactggctccagagcctttgttcttaaattctgtgctatcctagagcctacctactccttacttaaaactacagacgaggaccctagcaaacactatttccccagggtacttgccacaccctctgcgtggcccagatcctggccctggatgtagtatgctccagttcttccaggtaggctggagattcctggaagcttgtgggagaaggagccttataacaacctcccgtcttggggaccctatcctgggtcctgagcctcaggagcctgcctgcagtccctgttgtaggctcttccccagctaagcatctgctttaggtgttaggccacatgaagtacgtcatcccaacagattcctgggcaaggaggaaggctgggagtcaggcttccatctggcctgggcttagcatctgaggggactttcacccttccctgtgaaggttggaagaagagggggccccagaaccttgccagggagtctgaggtgcaaggagtggaaagcgggagggacactggtcaggatgatggagtcctgttaccaaatagacccagaaagtagggctgcccactccttctcagggatcagcaagtggaatgtgcttttctggggaaataggacgaaagggccgggcgcagtggctcacacctgtaatcccagcactttgggaggccaaggcaggcggatcacctgaggtcaggagttcgataccagcctgggcaacctggtgaaacccagtctttacaaaatacaaaaattagccgggcatggtggcacatgcctgtaatcccagctactccagaggctgaggccggagaattgcttgagcctgggaggcggaagttgcagtgagccgagattgcaccactgcactccagcctgggtgacggaataagactcggtctccaaaagaaaaaaaaaaaaaaaa

SEQ ID NO: 57954 - DNA, 1783 bp, Homo Sapiens; identical to SEQ ID NO: 26882

SEQ ID NO: 57955 - DNA, 906 bp, Homo Sapiens
atttccaactagctggcgggggcggaagatggcgacgcccctcgggtggtcgaaggcggggtcaggatctgtgtgtctcgctttagatcaactgcgggacgtgattgagtctcaggaggaactaatccaccagctgaggaacgtgatggttctccaggacgaaaattttgtcagtaaagaagagttccaggcagtggagaagaagctggtggaagagaaagctgcccatgccaaaaccaaggtcctcctggccaaggaagaggagaagttacagtttgccctcggagaggtagaggtgctatccaagcagctggagaaagagaagctggcctttgaaaaagcgctctccagtgtcaagagcaaagtccttcaggagtccagcaagaaggaccagctcatcaccaagtgcaatgagattgagtctcacattataaagcaagaagatatacttaatggcaaagagaatgagattaaagagttgcagcaagttatcagccagcagaaacagatcttcagcccaccaccagccggctccgttgcaggaatcacatgtctgacttccggatccagaagcagcaggagagctacatggcccaggtgctggaccagaagcataagaaagcctcagggacacgtcaggcccgcagccaccagcatcccagggaaaaataaaatggccgccgctttcctgttctctggctgtaatccccagcctctgccttctctgctctgggagtccccagcctctagcccctgctacttccctccctcttggatagtggtaggggtccacaaggtgggggcttgtagcctaggggaggagctgggtctttgttgtctggtaggcaccaccgcttcctttgggtatttaatcccttcctatataaacagccctggttacccagt

SEQ ID NO: 57956 - DNA, 2561 bp, Homo Sapiens
ggtggcaacttggtcgggtctgcttccgcgctgtggaggttttgttttttactctttgcagtaaatcttgctgctgctcactctttgggtccgcactgcttttgtgagctgtaacactcacggagaaggtctgcaggttcatttctgagccagcgagaccaccagcccgccaggaggaagaaacgccgaacgctgccgaacatcagaaggaacaaactccaaacacgccgcctttaagaactgtaacacctggagggtccgcggcttcatgaagtcgcagagaccaagaacccaccaattccggacacaaatgcatcattgcactccagcctgggtgacagagtgaaaccctgtctcaaaaataagcttccattgacgaccagctttggctgttccaactcaccacagcctctgaaagacccatgctctctttggattgcttggtacctgcagcacgtttccatgcctgggagggagaataagagtaagtgaacagtttactcttactggaacattccaatgctcttacagataataactaagtgaatgaaaacaaaaagttcaggcattcactggcaaaatccaactctgaacaggtatggaggtgggtctggatttggctcaacatttcacttcgctactcgtctgaaatgcacctcagagcaagggaggcagcaatcaggtaacgcacgtcatggtgagagtactttggtcaccacgggaaacacaaccaaccaagtgttttgccaagagacacagatcggaacgctcatcacaacactgcatggctcattcagtgcaggttgccacaggtctacagtcacatggttaatgaaaatccaaaacaggaccaacaggatgacacattttctgttcttaatgctcattgccattattgctagatctcactctgtagcccaggctggagtgtcgtggccagatctcggctcaatgcagctttgacctccccagctcaagtgatcctcccacctcagcctcccgagttgagtaactgggaccacagctatggtcagaaatcaggactgtcattcagatctctggttcacttcttcattgagacgagtgatggtctttgaaagccagacgctgtggcctgctgtcggggctacccacctccactccgccttgttgtgtaggaatgagttacacttgtcaggaaggctcgtgtcatttgacatggactccaggattgaaatgatttgcttgaatgatggccgtttctgaagaagagaaaataagtaatcattcgctgggacttaagaaaggagacatttaagagaaaacgtagatactacaagcatggtaaggaccacaagtctcagaagagtaggaagtgcccagcatcacacaggaagcaagttacagaaccaagggctctgttcataaactgttcaacatcttttatcacataagggctcataggtccaactaactgaaagcctcaatttgtgggaagaagagaagcgaggctggggacacagcacaaacggtgtttacgccactgaagttcttttgaaatggaaaggctctgcatgaagaagcgaacagttatgccactgcctcgccaattccagtgaggagctcatcttcaatgtagtgttcaacgtaggtggcaaaactgtaatttttcccttttttgaaactattttttcttcttttatttttgaaattctcatctaagcgacagtttcttgtactatagtgactcctgctgggagaggtaagttgaagtagctgaaggtctcttacagatatatcaactcccggccagtaaaaaagatgtcctaaacgcaggagatggagttaaactgttcccctaccttggacgcaatggcttctttcatcactaagaacaaacccctaggttttacaattgagactgggaaactagtacagtacttgtacaatttttgatctacagcatcacgacgtgaagctgcaacaattagatgtaaagggtccattcatgaggaataacatcactttgaccctttgtgttagctcctactgctaatctttccataagcgtgaacttactttcaatttgaagaagatgaaaaagtcttttgcaaaaccccaatactgttttctgatctatgtacctgaatggagaaacgtagtcttacctcgtttttttccactacaagccaagctacttgtaatccttccaaacctttaaaggggacctcccttgttagcatctcccagagaacctggaacaaaaagaaaatggaatttttatttttgtactttatattttttggtacatattactgagaccttatctaacatgtaattgtatctaattaccagacacaaccaaccccaactgtagaaacttgggcaaaacaattaagcacacaacttcttctatatattaaatactttttacgttcttttttataaagaaaaaacctggtttagaaattaggacatctagagccagacttaaaattttatgaaaccaatgggcctgactgatttaatgtcatctcataaattatcagaatttttatgttctcacaaaaaaaaaaaaaaaa

SEQ ID NO: 57957 - DNA, 929 bp, Homo Sapiens
ttattacattcatcgtttttgtgatcacaaaaacacaaagaaggaggtctgcctggatgggattacaaagatttagccagtttcttggtatataacagaaggtaccacagtatcactctctattttgtaaatatttagctcctatgaaatgcacaatgcacaaccgcctatgaccatgtatcgtgtgctagtccgggaagccagcctacacatcaataggaacgcccaaacattattttcatatatcagtgcaaagaaagaaggttcgtaaacttctttaaaagttcagctttaatgacaaagatctattacatcagtctttttcttcaaataagatagatgtgaataaacaacttcaaacaggaggtactatggcctcttcaatacactgtagccagtgcactgggcccttggggatgcccagtgatatacacgttaaagcagtaatgtaagtctgtgagccactgttcctgaacacttccactcttcaatgtctggagagaaaaacaagagtaatctgagaactgcacccaaatcactatgctacctgacagtatttttcacacccaaacacaatttcccagagcttggcaactgtatccccatctgtaaattaccataggaagtcttccaggaaacagggaactattaatgggccttaccacaggcagtgaaaattctagttatatcctcaaatgctaatggtttcttgtaagtctgttccttcctgacatgcctagaagactaactgcaaaatttcaccatccaaagcatccctttcacccttggcttttccgcttggccatctaagggttcaagaactttaccccacgtgcccaccggtaaataaccctccggcgcaaccacaaattttgtcacatcctcttcacaaaggggctattcccaccctggtgaaatcagacctagta

SEQ ID NO: 57958 - DNA, 3141 bp, Homo Sapiens
gcatcttgctgtgcgcaccgcccgcgcgccccgcgccgtcagcacccccagcaccgccagcgcccccggagtccactgtgcgccctgcgcccccgacgcgccccggggaaagttcctactcgtcaatttcacacgtaatttacaataaccaccaggattcctccgcgtcgcctaggaaacgaccgggcgaagcgactgccgcctcctccgagatcaaagccctgcagcagacccggaggctcctggcgaacgccagggagcggacgcgggtgcacaccatcagcgcagccttcgaggcgctcaggaagcaggtgccgtgctactcatatgggcagaagctgtccaaactggccatcctgaggatcgcctgtaactacatcctgtccctggcgcggctggctgaccttgactacagtgccgaccacagcaacctcagcttctccgagtgtgtgcagcgctgcacccgcaccctgcaggccgagggacgtgccaagaagcgcaagagcctcatcatcactcaggatacaacagcgcgagcagctggtttggaggcagcagggaaaaccgtgcaaaaggttctttgtgagagaggaaactcgcttatgaataacaggactggacgccgtaaaagttggcggctggaattcttgtttctcaggcgccgctgttttctcttgactttttatctctggtttttatttttttcccgttttcttttaatgttgtttcttcctcttctcacatcagttgtgacttttcttcctcctctgcgagcccgaaggccacctcattagtgctcctgacactgcggaacttttctttctcaaggctgttgtcactggggatggttgaaagtgactattttcctaagaaaacagctggaggggacatgggagcaagaaggtgcttgggagcgcatctcagtgttgaggctcaaaacaggcagcgccatggcagagtcattccgccgtcaccctgaataaaccccatgcacacagacgagaacaatgtctcctcacagggagggtctgggagaccggacaccatgcagagacccccatcagctcatcagagagcttcacggagatgttctgggaggacaatcacattcataaatacgccggtgcctcggctctgccgctgactgcagcatgacatgaagccttttttaagaactggctgctgccgccaaagccttctgggatatgtctgcctggaacctgggcacctcctgggagcagtcactgggtggcctgtcaggggctgtggggtcctggggcagggccggcaactggaagccagccctggggaggaaaggagagaagggcaaggctgggctgctttcctcacagcccctggacactgagggaggagctgagttgggcctggggctgccatgtgtcagacagtggtgatgtgatggggggacacaggtcagtggcagggtactgggagtttcccctttcctttctcagttctttgcacccattttccatgggctgcctccccagatccagaagccccagcagcccctcaccccagcagtggaaaaagcccgtcattgacacggctgtgggtggccggctttgcaaaagcctcacatttggggctttggagggctttttgcatttcatctttacacaggctcctgcacctcattcctcttgccctcctctcagctttcctcccacttccagttagagagatggcagctctggcaggaccaaatattgatgtttatcacagttttagggccatttgtctcaccatctgaagggctcagcgcaggcccacgggatcctctctccttgagtgacctctgggggcaggtatctggtttggatgctggagctggtccctactcttcccttgggggccgtgcggccgggtgctcaagtgttttaacctcaggaccctgattagttatcatgaagctaccccaccagctcctgggtctgttcatggattagtggcataaaggacgtaatattgttttgcaaaatctgctctccctcccatgtctcctgcccaagaagttggtcttcgtggggccaaaggcaaggaggacccgaggaaggaagaggaaccactgtccccagcccctggtatggcatggcgtcagcctagtgaccagaaattgcttttgaactctgaggcttccagaggacaagaggaagaggaggacagggctgccctgcccactgctcagccttgagccctgcacctggcacagtgcgaggcctcagacagggtgtcagcaggccctggctccccacatcccatccttaaacaggccatgccctttctacctgccccagcagaccagaaagcagtttccatgggaaacaacaaaccttccttgtgctcccaggataagtgtttctagagggcgaagtcgggagccattctctcctttaacatcttgccacctctgcccagaattcacagccaccggcgcctgtcttagctgccctggctgtcagccccaccagagcccctcctggctgctctgctgaaagctggtcagactgcctcactccatcccctacttagctcccctaaggcctagggggctccctacaggccaagggatgaggccagactcaatagaacacctgataggccccccaagtgacctggccctggccggtcactccctatgtcccaatttacaccccagcagcacagaactccttgctcaaaggggctatttttggcctctgtgctcatgccatcccttctgcctggaatgcccttctccactgtctgcctggctaactcctgctcattctggaaggctcagctcctcctgaaagccctccctgaccccaaccccagctccttcctcagggtgtcgtagcacagggatgcttttggtctaattcaggagagcatcatgtgatatgcttttaaagtaatgagttaaaatgttagacaatatgaaactctattatgtgatatattagatttcatgtcattacattgtattatattatatttttaggtggtatgctatgtgacataggatgcgatgtgatattacatcccatgacactatgttacacggtgttggattaaatgcctgtgtctctggctagaaaaaaaaaaaaaaaaaaaaaaaaaaaaaaaaaaaaaaaaaaa

SEQ ID NO: 57959 - DNA, 618 bp, Homo Sapiens
ccgctgttaaatatcatgagataacttgttctcccaccaattttcttttctttcttaaatgatgtcccttaagtcatatcccactaactttctatatatttctatatttccaacattaatttttatgatgcattacttgatttgcccagaatgtattatggatatatgttcttatcacctttttttctccattaacctgatgtatttatttagccagatatgctgtttatcaacaaagaaaatatatgtggtttatccttgacctcacctggtctttatttggatgccggtagaatccctttctgagatctatagggagggtgggttatgtgcatagcttttgagccagagtctaatgtttagattctagatactaaaatagattatttttctgtttcacatctgttggactaaactagaatcttctataactgtgggagtacaaagaaagatttcctatcactccattggttgtttggttgattgactaattgattgggagccacgcctccctgaaaggatcacaccattgcatgcctatctggcctcctcatctttccccactcccaagctcttggcctagcatttactgggagttgtagtctgaaaaattactag

SEQ ID NO: 57960 - DNA, 3597 bp, Homo Sapiens
cgcttacatctccagagaaatcctgaggggactggcacatcttcacattcatcatgtgattcaccgggatatcaagggccagaatgtgttgctgactgagaatgcagaggtgaaacttgttgactttggtgtgagtgctcagctggacaggactgtggggcggagaaatacgttcataggcactccctactggatggctcctgaggtcatcgcctgtgatgagaacccagatgccacctatgattacagaagtgatctttggtcttgtggcattacagccattgagatggcagaaggtgctccccctctctgtgacatgcatccaatgagagcactgtttctcattcccagaaaccctcctccccggctgaagtcaaaaaaatggtcgaagaagttttttagttttatagaagggtgcctggtgaagaattacatgcagcggccctctacagagcagcttttgaaacatccttttataagggatcagccaaatgaaaggcaagttagaatccagcttaaggatcatatagatcgtaccaggaagaagagaggcgagaaagatgaaactgagtatgagtacagtgggagtgaggaagaagaggaggaagtgcctgaacaggaaggagagccaagttccattgtgaacgtgcctggtgagtctactcttcgccgagatttcctgagactgcagcaggagaacaaggaacgttccgaggctcttcggagacaacagttactacaggagcaacagctccgggagcaggaagaatataaaaggcaactgctggcagagagacagaagcggattgagcagcagaaagaacagaggcgacggctagaagagcaacaaaggagagagcgggaagctagaaggcagcaggaacgtgaacagcgaaggagagaacaagaagaaaagaggcgtctagaggagttggagagaaggcgcaaagaagaagaggagaggagacgggcagaagaagaaaagaggagagttgaaagagaacaggagtatatcaggcgacagctaaaagaggagcagcggcacttggaagtccttcagcagcagctgctccaggagcaggccatgttactgcatgaccataggaggccgcacccgcagcactcgcagcagccgccaccaccgcagcaggaaaggagcaagccaagcttccatgctcccgagcccaaagcccactacgagcctgctgaccgagcgcgagaggtatcctctttcctttgtcacttagacattgccctggaaagtcgtataacgactcttcagaactgtgtcatatgagttctagaacgggccatagagtttagctaattatctggtttcttcattttctaactaggaaattgaatttcagaggagtggagggccttgcccaaggtttcatattcagtcagtgctttttccataaaggaccagagtgcctcagttaacatatcccagaagaacttgaaactgaactaaactaaaagattacatgacacagtcactcttaaaaatgtggatgagggaaagagtggtctgatgaactattctgccaagctagtataaagctaaagtgtgcctgtggctcaactttctgactttgcagatgtcaagatgccctgctagattggtgcattagggttacccagagcctcagagtaggctgcggcagggactgctcgggggtgcaagatgggcgacaggtgtgcctccagaggtgttgaatcccggcccacaggtggcagcagccttctattgtgtctgccctcacaggcagtagattctagaaacaagtgttctgtttgttctggagtgcttttatatttggtggagtgaaatgcattccggatttctgatgatagttttttagtctgttggtttagttgcttgtgacagattaatttttttctacttcatcatcatatacagtcttagaattctgagcgaggaggagagcttagagactgccttgctaatttttatcttcataaatattttctttttcctgaatctaatcctagcactgctttatgtaccttcttttttccagctacccctctcttttctggtagcagaagaaaacagaaaacttacctttagatttcttccacttttagactttctttgatatttctgcttttcccctactaacactgagttatgtcttctaattctctgatgcaggtggaagatagatttaggaaaactaaccacagctcccctgaagcccagtctaagcagacaggcagagtattggagccaccagtgccttcccgatcagagtctttttccaatggcaactccgagtctgtgcatcccgccctgcagagaccagcggagccacaggtagcgacagccagctttgctgtggttgaggagactcatgcaacggctcgctgagccgcaggcctgctgtaatatcacagtttagtttgtcaccacactgaaaaagaggagagattagcaggagtgagtttagactaaaagaaggcatagactcagttgatagggaaatatctttttctttctttttgagatttctatgtactcattaagagtatctagagtgagtgatttcttctaactttttgccttccctaactcaggtgttaagtgcctcctttttctgatacaaagatcttttagtttagtttttagagaactgggattataaatacatagagggagagccaggaattttctttgaagtattttaaaagtaagcgctttactgtgtgagccctggctcttggccagtcctatgaatgggccttagatgatgcccctgaaattgcatgcaaaatgtctttatttgctcaaatgtgtattttttgtgggggtggggggaatgaccttttatcagattctcacagggttcaagatccaaaaaagtttagatctagtgggttaggtgtggatttctctgaaataggccagggaaaaggctgtgacctctccttgggtctgctgcagcgttctagccttggctaggtgaggggaactgttgggccgatgctgtgtggctggagcagaacccacagtgctgtccatagaggagaacaagcaacgaagatcatggctaaagatcttagagatccttaaaatgccgattcctaatctcttgctgaaaactactgacttttagatattttcccgcttgccactctgtaatccagaatattaggaacaagttcttaaactcgagtttacttttcactggtgtttgcatgtgtgggggacgaaagtttatgttcttgtggcaggaaactgtgggatctgcagcatggaggagttaaaaaaaaaaaaaaagggctggggcacagtggcacgtgcctgaaatcccagcactttgggaggccgaggcaggcagatcacctgaggtcaggagttcgagaccagcctggccaacctggcaaaaccccatttctgctaaaaatataaaaatcagccgggtgtggtggcaggcacctgtaatcccagctactcaggaggctgaggcaggagaataacttgaacccaggagtggagtttgcagcttgcagtgagctgagatagtgctactgcatgccggcctgagtgacagagtgagactccatctt

SEQ ID NO: 57961 - DNA, 583 bp, Homo Sapiens
ccgcccacgcgtccgcagagggtactgagaaagacctgggaggcaggatggcggctaggactaaatcctctctcccagagaaggccgagcctcctagagccagagaaggaggcagaggagggacagcaaagggaagaagagatgggaggatgccgtgtgaacaaagccaaggcggggaggagaagaagttattatcagggtgggggtgggctgagggcatggttcaaggcctgatgtctttgcctcctaatgccgggggtcttgctggctgggtcaggccactcacaggaatgggccataatccttggttgacaataaatggacaaagcagctgggtgcggtggctcatgcctgtaatcccaacactttgggaggccaaggtgggtggatcacgaggtcaggagttcgagaccagcctagccaacatagtgaaaccccgtctcaactaaaaacacaaaaaattagctgagcgtggtgcgggcacctgtaatctcagctactcgggaggctgaggcagaagaatcgcttgaactcaggaggcagaggttgcagtgatgagagaatgtgccactgcactccagcc

SEQ ID NO: 57962 - DNA, 208 bp, Homo Sapiens
aggcacattaactaaaagacaaaactccacataaacctgagtccttccaaccaacccggagacttacccaaatctaatctaaataacaacaacaaaaaagaaaaaatcactatgagcctgtaagtcattaagggggtacatcttcaaatgacatgctatcactaaccatgggcttaaaaccccacagatccctaaaacttaaagtata

SEQ ID NO: 57963 - DNA, 801 bp, Homo Sapiens
  misc_feature (600)..(600): n is a, c, g, or t
gccagggtcagggcagatgcaggaaaccaggccaggaagctgtggctgtcatctaagcaagagacagacaatggtgacacagggaggcaagtatacccccaggcctggccacctctccagctctgctcctgacatgaggctcacccagaaggtccttggccatagggtacattggtgccagctgcgtcttcagacaggagaaaaccccagtatgtgtctcaagacagtgagatgtcaagagtcctgctctcttagccctgaattatacaaactggagatttcagccaagaaacaggcagggtctgccccacttacagctcatgtgtctgttttgccgaactaagaaagtgagggcttctctcaatttggatattcatatttctggtttatctgctagctttcctcccagaacttctgaaagcatactctgcttttgggaaacctaagatcacaataaaagtggcagacctctttatccctgtctcacaaataaatggaggcacagaatggggaagtggaggccgagggaacaaagccaactaagactgcagcccggttccctggccacagcactgagggttgaggggtgcctccagtganggctccccatccccgacttggaacacagctcatagtttctgcatgcctatttcatacgcactcttcaattttcctgaattaaaacaacaaaaaaaaaaaaaaaaaaaataacaacaaaaaaaaaaccgcggctttggggggggaaagagaaaagggcggtattttcgcccctttgaagggaagggccaaggggaaaacggc

SEQ ID NO: 57964 - DNA, 5327 bp, Homo Sapiens
gtttcatggcagagaagattaattaaacaatgtctttcaattttaataaatttcagcaatttgaaaaaaatttgcattctgaaaaatttcctcaagaatttgtttcatttttatttattattattattattattattattatttttgagacagagtctcactctttttgcccaggctggagtgcactggcgccatcttggctcactgcaacctctgcctcccgggttcaagtgattcttctgcctcagccttgtgagtagctgggaccatgggcgcctgccaccacgcctggctaattttttttgtatttttagtagagatggggtttcaccatgtttggccaggctggtcttgaactgctgacctcaggtgatccacccgccccggcttcccaaagtgctgggattacaggcatgagccactgtgcctggccctatttgtttcatttttaaaccttgtgtctcgtagagtcgtagggatgactgaaaatgtcaccatatacaatttttttataaaactagaaaatatgaatactctgattgcaaccattcataaaatagaactacaagtacagatcataatgttaacagtggttataatatctgcatgttgatataatgatggcaactatttatatttttctgcattttccacatattaagagcattttctcttataatcaaggagtttaaaaatactaagccattttgatagatcttatactcttaatacacatggcaaaaatgtcaaacattggcatcaataattaattgaattggagttattttggtaacacatgtatctttattcagtgttcacatataacaaatgtgaaaaagaaaaatgttattttttaatttaaaaaatctgagttgcagattacagtataggtagtaaagttttctaagatggtgaaaatgtaccttcagttggaagaaaagtattactgtgtcttctttaaaagtgatattttaaaaacatggtttaaatggatttgagtcacatctttcttttttgtctcattaatacacacaaacacatactcttaaaattgtaagtatgttaagaagatatgagtttcattgtttaattttaatgtaagttaatatttatgccatcgaaggagcatggcttagtgaaagagaggtcttttgagttaggaagacctagatttcactcctgattgggtacttacctcttgcatgactttggcaaatttcttagtgaccccagtctgccttggtctggtcatctgtaaaatggcagtaatatttgcttcacaaatttagatgacacagtatacctaaagcaccttgcaaagagtagctattgaatgaacgttaggatttttcccttttcccgagaaaagtaaaacattaactagcgtactggttaattatgagtcttgggattttccattttgcagctttcaaaaaggaagaccagccaagaaagtcttgatctagccatgaaaatgccatgtgagtgattagtttcctcaagtaaacaagagtccatcctctccccacccctttttctatatgctttttctttctttcttcctttttttttctaagacggagttttgctcttgttgcccaggctggagtgcagtggtgcaatcttggctcactgcaaccttcgcctcctgggttcaagcggttctcctgcctcagcctcccgagtagctgggattacgggcatgcactaccacacttggctaattttgtatttttagtagagacagggtttctccgtgttggtcaggctggtctcaaactcctgacctcaggtgatccacccaccttggcctcccaaagtgctgggattacaggcgtgagccactgtgcctggtctattattattttttaattattatttattattatttttaaatagagacaggatctcactatgttgccctgctggtctcaaactactggcctcaagcagtcttctagcctaggcctcctgaagtgttgggattacaggcatgtaccacagcaccagccttaaacttttaaaaatagttttattaacatgatataggcttcacatatttaaaatgcataatttaatgagttttgacatatgtatatacccacgaaaagatcaccacaatcaagataatgaacatatatattatccccaaaagtttccttgtgtccttttgaaattcatacccccttattctcccaacctggaccccaggctgttactttttatgaaaacatgttagtaaatgagatttaatgagaggaagtatggtttactacagtgggtctggctgggtgaccttgcctgagtgctgtaacttccctaattcattgtattcttagctgtagaatggagctggtttataggacctacttccagtgttgtggtcgtagccagtagcagttagtacagtgtctagcacataataagcacttcataaatggtagctgttgttaatagtattttgttttgtgttatgctaaagtacttgatacattaggtagttcatcatcattatgtgcccaatatgatgccaagtacgagtacttagtaggtactcagtttatattcattccctctccctttcctcattaattctggataagtatacctcttggcatatgtcattgttcactaaccctaactcccaaatttaagaactgattgaaagttgacattcattcatttactcatccattcaacaaattttgttgagcacatgctgtgtttcattaatcaaactgagcactgaatgattccacctttcataagacatgggacaaattctgtgtacacataaccagaatatccagaggagatgtgtgaatagggagatatggaagttgagaggcaggagtaagtgcttctagctgtgggactcaagagatggcccgaagggataagggggaagataatttaacctgagaaatgggatgagtaccgtgcagggttcttgagctcagtctaggagtgggaagcagtctccatgtaggtgggacacagcacatgtggaagaggagcatgaaacgcccgagagaattggggcagtccctgggcagctcactgctgggctgaggaggtgagacagactttgtcaggcagtagagagccagtggagattttgcagcagaggagacttaagttataccttaagttggctgtttttgaggtggctcttgtgcatggattgagttgacaggcagatagttgagcaatctggagagctttgaatgtctgaatatttcttagcatcttaactaggttagtagctccacggaaatgcaaaagattggtaacattggtgcctggttggttgtcagggttggaactttcttgctttttcttttggactacttgtagagtgcttattatgtcccagccactcgtaattctatcctcacaggaatgaagcataggtacaattattacacctgttttccagatgaggaaactaaaggtttaagtggctaagagaaacctttttgtcctccacctgtgctgctccttctcttcctgtccaggccttcttcccattcagacttactctttcattgacctctcagtttcccttcaccagcatctccccatctgccctcttttgtctgtgtctaccggtgtatcctttgctcaggtcctcatctcttcatatcttggcaactgttgtgacactctccatgccatcatttggactctagaattgttttatctaaacataattgggtcatgtctgtgtgtatgtgtgtgtgcacatgcatgcatgtgtacgtgtgtgtgtgcacgtgtgagggcaaaaagatacctcctaggcctggcgtggtggctcacacctgtaatcctagcactttgggaagcagatcgcttcagcccaggagttcgacgccagcttgggcaacatggtaaaacccaccctgtctctacaaaaaaaaaaaaaagatgcttcctcattgtcttagagtgaagcatgacactcaaggctcttaatgtgttcccatctttatagatttagtttgccccctgccctcaaacaccacattcctgtttggctctgtacctttgcttgggtggtttctctacttgaaatgcccttcttccttttctctgcatcatgagtttctcatcattcttcaggaactcacacaagtcactgtgtctgtgatgcctttggcaactgggctcttcattccttcttatcaggctataacatgacctgtattttaactacttatccagtaccacaccctttcaaagttgatttagtggcaacttacaaacatacataaagcagtaaaaaaagaattggatgaggtatagaattactatacctagccagtctaggagcaaaatggactattggactagaaaaataaaataaagccaagaataaagttaatatagaaatatgttccatcatgtgctgcacgttgctgcaggtggcctcagcttttcctctgaacttcctaaagagagaagtatcatgaaatcttaagagttttcccagtgacagaaatgacaaagccaggtgctctggagaagaatttttcctgaaacgagatgggagggaaatgtttctggggtaagtaggaaggtggaggtggtaccaagtctgcagcctgaacacatacatggtgagtttcatgaggtggcttcctatgagagacctccatgcagctatatagcatggtaccagagcacaattcagtaaaagagctttataaaagccaggactgtgatgctgcaaccttaccactttttgttggcctagcttaatccaagtataaaatgtagaataaccaagggataatactcttcacgctttgttatagttattgttttatatccatttacggccccccttatctcagtgatcagcttctcacaggaagggatcatattcacgttggtttgattaatggtagaaaatcagaaaggtaaggaatgaggaaaacaatttatgactgtgatttgtccaggaatcatcacagcgctccattttgaattataggtactcagaaagtgagattcaggccaggcacagtggctcacgcctataataccagcactttgggagggcaagacaggatgattgcttgagcccaggagttcaagatcaatctgggcaacataatgagaccctgtctctacaaaaaataaaaaattagctggatatggtggtgctgtgtgcctgtgatcccagctgagaggttgaggtgggatgatcacttgaccctggggggttgtggctgtagagagctgtgattatgccactgcaccccagcctgggtaacagagcgagagcctgtctcagacataaaaaaaaaaaaaaaaaaaaa

SEQ ID NO: 57965 - DNA, 440 bp, Homo Sapiens
  misc_feature (356)..(356): n is a, c, g, or t
  misc_feature (401)..(401): n is a, c, g, or t
  misc_feature (424)..(424): n is a, c, g, or t
cttgtatctaactttcctgttttctttctcctacttctcttctcttaccaagaatgtgaagccttttggagatctgggagaactgcaaagctctactctgtctaaccaaaccctaaacatatattccaaaactctattcagtttgatttcttcatgtttttatgtctatcaaattaaaaagttgacgttggtttgcgtatctcttcttcatgcttccatttttttcttttgggtagtactgctggaacactaagcaggcagatcgccagaacacaatacaggttgagcatacctaatctaaaaatctgaaaatctgaaatgctccaaaatctgaaactttttgagcaccaacatgncactcaaaggtattttggactgaggcgggcagatcacctgagggncaggagttcgtgaccagcctggncaaagtggcaaaaccc

SEQ ID NO: 57966 - DNA, 1231 bp, Homo Sapiens
gggggccgggcgcggtggctcactcctgtaatcccaaagcactgggattacaggcatgagccaccgtgcctggcagaaaagcttcttttccagttctgaagagtgtgaaggtaggagagccagaattcagttctctcactttccaacccagtacctggagagagagtgtcttgctggtcactggggagtgataggatccggatgcccgccttcctcttcaagtttttctttctgattgggtttcctgaccctgattgctggtatgggtaagaatgactctgaattcctgagaaaagggaagagggttaggacagaggaaatggaatcatttagtcaggtaaagggagcaaagccaccgaaggcagtggttggaggtgtagatgtgaggaagttgggttgagaccattcaccatcaaggcttgaagatgagtgtctgtttgtgtgtgtcatgttggctgtgagttgcagaagagagtatctggcctctagttgaggagcacttctggcttctgagctgaacatggtgtagaagagaggatactcaatccaaaaccctggctatctatgcagagggctgaccagttctacccgtgtacccttccttccctcacccttcctcacaaaccaggcatattgagagctgtctggcagtcaatccaggcgaggcagcaggtttgagaatgggcttgtccgcctggcacctgcttccccccacttccaccttcacccctccatcccatatatcgttcagggtcctcccagcacagaattgaatagaaggacttttaaggcttggagggcttagcttggggctctaacccacaggaattctttctgggttctgaatatagtaataaagggcactcttggccttaggttatagataggagatggggaatctgttcttgtctttgccaaatcttgcatttatgggatgatacctctttgattagaacagccataggggaagagtggaggaagtaagtaagtgcttcattcttggatgaatatatgcataaacatacctgaaagaaaacatctagtcagctgggggtatgtatacccttgaaaatacagcaccaggccaggcatggtggctcaattctataacctcaacactttgggaggctgaggtgggaggatagcttgagcccaggagtttgagatcaacctgggcgacatggtgaggccccatctctataagaaaaaaaaaaaaaaaaaaaaaaaaaaa

SEQ ID NO: 57967 - DNA, 1745 bp, Homo Sapiens
gcattgtggttcagtggtagaattctcgcctgccacgcgggaggcccgggttcgtttcccggccaatgcaccagaagatgtagttaatagaatttaatcttttctaagtgcacattgaagttgccttttatgttcatattatgttcatattttatttgaaaaatctatagcatttttattgtgctgaaagcattaatatttgcagcactttgtgagacaggcaaaattatctttttgctgacttggaaactgcaagagttaaaagacttgcttggaatcacacatggcagatagaggataaggaaaagatggcctttcagttcctcatcagtaccttactactacagtgtctgcagattggtgtcttacattcagctatgatttgttcgccaaggtaccgtgtcttcttactgaagttgttttggctggcgcttgcctccgttcagagggaactgagttacctaactttatgatgctaagagccaggaaggtactgggatctgggatgctaggcacccaaccagtctagactgaactccatactaagctgtttttctgtgttaaggcatcaagagtagatggtggtcctgattttctgagatatattatctctgaattatctacataaataactgaaacttttatgtaattttaaaactagtcaatcatgttaccacccttttgaggggcaccaaatttgagacccttacccccaatttattaattaatagctgttttaatcacctaatagctgatcacctaatgactaacagtcattttcatcctggaaaatgggaactaactttgactttgaaaagtgctgttattaaatgtgtgattcataagaactgaacatattttctttattattttccttcaggattcaactttaattgactccaaatgatgttatggtcattctgtttttctgatacgagaatagattgttctgagaacctagaatattcattgcctttatgaatctagaattgactttaaatttaggttattgtgtttgtcatttgcgctaaaaaaaaaattgccctggggaataccaaacttctcggtacattcgtgtggtgtgaaagtcaaaattgccaattaggttctattttgaccaaatagttgaatgttgtagacagttgtaaattttgaacctgttctaatttgccttttgccagatggcgcatttaactttgtggcatatcatcgactttcaaggaaagatttacttttcatcagattaaagttgaggaaggattttctttctaaatactgaggctctgaatttcccaagttggataccccagacagctagagtgatcttaaaagtgactctgagagttgacttaggaagtgtagacatttatccaaaatctgtatttactcctgacttacattacaaatacagagttttatttttaaagaaaatttcaataaaaagcaccatttaattaaaatctactcaccatcaaactttttaaaaagaacataagccaatgtcaggagttggagaccagcctggccaacatagtgaaacgctgtctctactagaagaaaaaaagaaatacaaaaattagctgggcatggtggtgcgtgcctgtagttccagctccttgggaggctgaggcagtagaatcgcttgaacccgggaggcggaggttgcagtgagcccagatcatgcccgtgcactccagcctgggcaacagagagagactacgtctcaaaaaaaaaaaaaaaaaaaa

SEQ ID NO: 57968 - DNA, 448 bp, Homo Sapiens
gactttcacaggtaatccactaacaagaatccacccttggagctctgtaaaaatacatgacacaggttgatgaaagtgctttgaaactagatacaggcagtggttctatagcatggtgaatgtactcaaggcaacttctttactttaacatcgttaattttatgccatgtgaattgcatctcaataaaaattgtgatcattttaaaaattgtaaatgactgcagtgtgtgtatagagatgatcactgtggcgagtagtggaggcactggaggcagcctgcaggcctgccctttatacaccttggttaatcatggtactaatgtacccacacagctaacacaatggaatgacaaatcctacagttagacatggaaggagcatcagactatgttgtgaagacagaaagaggatcttgtaggataaaattcctattagcaaaaagcaaaaa

SEQ ID NO: 57969 - DNA, 1591 bp, Homo Sapiens
agcgggtgtccctgaggagagggaggtgggtgcgcggcgcccgcggcctggggcgctgactcccctcacttggaggcgcactgcgtccggcagaggaggcgagcatcccgctcaggtgatgaggaacccctcgcgcacccagcgcagaaggctgctgccgccggacgcctccattgtttgaccacaacaagggccggattctcacccaggtaaaccggctgccggcgctgtccacttccctctgactcccgcctccgcaggcgttctcaccccttccaggactcgactgcagttttctcactgtccccggcttctcatgaactccgtataccccctcccagacattttcccgtccggatccatctctccgccacatcacctctcatttcccccagaactcagctcctttgtgaaacctttcttgccgaactctaacaactaaatctccccgggagcctgctccgaactgaactgttctggttgctagattgcttacgggctgtcttattgcaacaaaggagaccagataccgaaaaaagatttctgagctattgccttcttcaaggaacgttttctgatatttacagtttattgttttcacaggctggaacggtttttaggcattttggcttcttatttagagagggctcctatttccttcatagacgcatagttttttagagcaggaaattgaccttgttcaacccgcaggttaattaaaaatttaaaaattaattctaaattagcagagtagtacattttctttgtaaaaacagcatatcacagagatggcattttgtctttgactatcaacctctgtcttcagggatgccgactattatgtgtgtggtgtttatccttctagatcttttggagtacttttacgtgtgtgcacttaacatcatttttgactgctttaacaaggactgttgcaccgtaactttcaatgttagcatgtaatgcttcaagtcattttttaacaactgctgcaccatgttccatagtttcagtatatcatggtttagccatttcccaaattgatagcagtttaagttttaactttaaaacagcttttttgctggtggtggttctctgatgagatgaaatttcggtgataggagcacagatctacgctaattatcgagattcggcatttatgatgaagttctcttttggttaagaaattgatatgtggaagcagccacccctcccctatggtagttctgactctagcagttagaagttgtgtgaccttggggaggacattgaatcacaccaaacctcggttttcttttctgtaaatggcctgctctgtctgctccatagagttcagtgatacagtgcgtatgtgttgtggaatgtaaagtagtatatataaaggttggttttattagcctttgtgatccaaaaattatttgcaatatcatttatattttttgaccagatgtgtgtgtatcatatcacagagcactacagatagtcaactttgaatgctttttaatttgtgactttttaaattaatttttatcaagtactgacaatacattagtcttcttaaaaaaaaaaaaaaaaaaaaaaaaaaaaaaaaaaa

SEQ ID NO: 57970 - DNA, 624 bp, Homo Sapiens
tgagttcttaaccagtcgagtgaaggattcaaaattaaccactccaagggaggattgaaaaaagaaccactctcagtggacaaaaagaaagaaaggggagagggtaacacagggatataagccctagtcacccgagccagcaacggcaacccttctgggtccccttccaccatgtggaagctttcctttcactttgttcagtaaactgcgctgctgctcactctcctggtccgtggactctttttaagctgtaacactcaccgtgaaggtccgcagcttcattcctcaaagttagcgagaccacaaacccatcggcaggaaaaactcctaactcagttacattggcaaatttgaaatcattgatgatcacagagctgggaaaattgttgtgaacctcacaggcgggctaaacaagtgtggagtgatcagcctcagatttgatgtgcaactcaaagatctagaaaaatggcagaataatctgcttccatcctgccagtttggtttcattgcactgacaacctcggctggcatcatggaccataaggaagcaagatgaaaacacacagcagggaaaatcctggaattctttttctagggatgtaatacatatttacaaaaaaaaaa

SEQ ID NO: 57971 - DNA, 826 bp, Homo Sapiens
  misc_feature (425)..(425): n is a, c, g, or t
  misc_feature (679)..(680): n is a, c, g, or t
  misc_feature (685)..(685): n is a, c, g, or t
  misc_feature (688)..(688): n is a, c, g, or t
  misc_feature (691)..(691): n is a, c, g, or t
  misc_feature (698)..(698): n is a, c, g, or t
  misc_feature (804)..(807): n is a, c, g, or t
  misc_feature (810)..(810): n is a, c, g, or t
  misc_feature (812)..(813): n is a, c, g, or t
  misc_feature (815)..(815): n is a, c, g, or t
  misc_feature (818)..(819): n is a, c, g, or t
  misc_feature (821)..(821): n is a, c, g, or t
ggtagtttgaacactgatcttacatcctgagaaacccctcagtcctgggtaaaccaggatgttttgtttacgtgtgttcatgtttaactttttcttgacctaaatttcttataaacttgaagttaggtctagtggcttgattagactcacattaaaacatttttgatggccgggcacggttgcccacatctgtaatcccagcactttgggaggccgaggcgggcagatcacctgggatcgggggtttgaggccagcctgaccggcatggggaggccccatctctactaaaaatacaaaattggctgggcatggtggtgcacgcctgtgatctcagctgcttgggaggctgaggcgggagaattgcttgggcccgggaggtggagattgcggtgagctgaggttgtgccattgcactctagcctgngcaacaagagcaaaactccatctcaaaaaaaaacaaaaacaaaaacgaaacaaaacacatttttgacaagaatacttaagtggtctgtgggcagtggctcaggtggaggcaggaggatcacttaagcccaggagttgaagaccagacccagcctgggtaacgtagaagaccaaatcttgagaaccaaaatatggttttttttttctgtgtgatagggttttatatcagttttaaacatttttttgagggtttgnntgtgntgntgntggttgntggttgttttcccaaaaaacaagtgtcatgaaaggaaaagttttaaaaatcttttttctcccaacttggggcaatatgggcaaaacccctattcctccaaaaaaannnnaanannanaannanaaaat

SEQ ID NO: 57972 - DNA, 480 bp, Homo Sapiens
ttttttttttttttttttgacattaacaactttgtttaatggcctgggagcttgagccggtcagatccctagagcagggtccacacactcagccctggactttctcccacctattccaacccagcctcacactcccataactgcattcctagccttttcttcacgtttttaacactgtgcttcacctagtaatcaacataaaaacaaagcagatagaaggacaggcctaggtcaggcaaccatctggggtaatgcaggtgtcacagctacaggccaggcttgactggcacaggtctggggagcctgggggcagcctgggtgggtgtgaattaacagcctggaggtggtgggagggggcattctgtgtgcctctggggaggggcggaggtgaggtgttctctttgtcagggacccttggatctgctggggacagagcctgcccaactccctcctaagcaacttctgtttcctctgctctcc

SEQ ID NO: 57973 - DNA, 2228 bp, Homo Sapiens
ttaatttcctggagagtttcaccaatgttttttgtagtagtttcatagtttgatgtcttagatttgtctctaatccgttttgatttaattttttttagatggcaagagatagaggtctagttttattcctctgaatatggatattcagtttttgtaacacaatttgttgaagagactcccccattatattgaggcaggaaaatagagtctggaggcagaaaacataagaccacttcacacttcacctttccatagggcatgggccataaataactttgtaactttatttcatcctctccatttacatagggcatactagggggtatttaaactcccaaaaattctgtaatggggcctttgagcccctacgcttgggctttttcccacactgtggagtgtattttcattttcaataaatcacttcatgccttccttgctttgtgcgttttgtccaattctttgttaaagacgtcaaggacctggacacctacaactggtaacgtatattttggccagccaggaggaagaagtaagcccaaagtttgggattcatttttctctctttcctttctgctccatacaagagctttctcttttcatttccaacttggaacacttggtgggcagcacctaaacgtggaggcaactgcaggtttctggctgtggcctgtgaaactaatgggtttccgtgcagagaaggctgactgccacctcctggtttgcttaaggaacctgggtctttttcatttttttttcctttatttctcagtctttaagtcgctgtttataattgccctgcccagaagggggaatgactttttttttttatcttttctgcacgtggtccccgatccctatgtgtggcgcagttcagagcaaactcgcacatgttttaagggacttaaaccttcttatgctaaattcttcccttaccgtactcaactggctacggaacaaaaaggcccacccggcatccagttctcattgcagttcatggctatttttataaagcttatagtgtgctctggaggtgcccacctaaggtcagagacatctgacactgagatcggatccacaggaggatactctgtgggtcctgcggacctcaaccttcccaaaggggacgttcctggcagaggttctgaggtctggtactaaaccctccttggaattttctctcatagttgcaatgctgtttggccccaacattgtttggaatttggagtttactgttgaatggaaaagtggaatggcattgtatctatgcaggcttttgtgctgtggttccaagcaggggacctggttaatgtgtgatgccctcctttggtatggtttggccccagtgctctttggattctggggaggtttggcctttaaaaatcaaactgccatggagactgctttacccaaaattttggttcacagccttcattggattatctactggggcaaagtaaaaccagtaagtttctattgctatctcatggctaaggttccaagctattgagtcttcatttatgtgtgtgtatacatgtctagatgtctttatttgcatgtacacttactgttatatgttatgtctaccaaattggcttataagtaaaagagcactcataagtaagtctaagcaattttcaagttcatgtgacttaaagtataactttactaaacaagctagctttaaaattattggtggaataaaaatataaatgccttcataattatcagcatacattttgtctgaattttatgtttgtctttgctaaatatttttaaatgtcagtgttaattcaagctgggagctacttagggtgagcctgccttcttccattctatccgaagtctcttctaaagttgcggaattgtccatatccattagttcaggatttttttgttttttagggtttcactaaagtttcaggtttctatttaacatgtaattctgtataccaaatgtaccagaaagggttatgttattcatgaaaaaaaaaagagaatagttttgtctaattcaatagttatctaaaagttggttcaaattacagatttaaaaaggttattcataaaacaatgtagtaaggaatcattaggcaaaaaatgtgggaaaagtttaaatcataaaatattttttaaaccctgataaagaattggagacgtttggctaattaaacattttcataaagctgttagttttgattaaagtaaaataaaaagtattgtaaaaatgc

SEQ ID NO: 57974 - DNA, 2314 bp, Homo Sapiens
acttaggcctttcttgcagaattcgccatatactccttaagggccgcggaatcggagcgaccttggtgactggcaaactctcggcagatgtgcgtgcactggtttgatgcagacgtggttgtaggcgatttaatttttcccagctttgcagcgactgttggcttcccagaacggatctccccagcctcgactggaagctgagggacaaaaattcataaaagcaattactctttcccggcgaggcttctagaagagcaagaagagcgatatgattacacctgcagccctataaagattgatctgtccgtctttcccttacagtcgtggcctgttaaacgttcctgtgttgttcagtgccagaatgagtgaccgctatttagaacaaaggattagtatcaaattctgcgtgaaattgaacaagtctgcaagtgagacccaccatcttttaaaagaagcttatggggatgaagtcatgtcaagggccagagtttttgactggcacaaaaggtttaaagaaggacgggaagatgttcgagatgatgcccgaagtgggcgtccagtcacccaccgaacagatgacaatatccagaaggtcaaggacttggtttgttcaaacaggcagttaaccgtgaggatgatggctgaagagttaaatttagacaaagaaactgttaggctcattttgaaagaaaacttgaacatgaggaagatttctgcaaaagttatttcgggtgttttgaagggtgagcctaaaccacgaaaacttgactttcggtccgatctttcaaaggaaactaggaaaaatagctcatgtttgaggaaaaaggtaacaggttctgaaacatggagttatctccagggtgaagctggtggggaaatgcccctgccggtatcccatcccagagtccactactctgccagtcagcttctgcaggcgtcatcttcaacaagccttccccccagggtagctgagaattggttcaccccatggtgagaggaatgtgagttagctgaaccagaactaggatgctgcctcactgttaggcaccttctttggctgctcacgtatttttcagtctccaccactcctccctatgtgccatggccctcctcattactctttgctggactcttggaccattttccttgctgttctccataactttgaaaaacttttggctgttcccttctggtatttgcttgttcttgatttcttttgctcaacaagtttggatttcttctctgcccagaccttagcttgttgtggctgtcctgttcctttgttctcaaccttctgcctcagaggatcatgccagtgagaagagaggaacaggatctcctggaatctgtatctctgtgcccagggaagcatgcttttctgggaggaccccaaaagaaggcttacagtttcagcctgctttgcagtcagggcctgaggtatggtacagaaggtagtagcatgctggtattactgaacagtgctgggcctaggggctgatctggcccagatgactcagtaggcacccttaggaatcaggggttggccaccaatactgatcttctcacaggcctacacctcacagaagagctgggtttgtttcattctagtcctatgctttggacctccactcatttgggtatcacccctgttggaagaggaggatctggtgctagaaaatataagcccggggacccaggcaaggctgtgttgtgtggggaggaagaccaggtggctctctagtccctgaattaagggagcctgctgcctgtgtgcggattcccacacagcagcctgtttttagtaactaatgcctatagttttgagaacttgctgtttttaggacactgctgggcattgacaatgtggaggttatgaacaagatctccaagggctgatgggcttcatggatgagatggttcttgaactggatccatgaggatgggtgagacagggctgtgaaattagggaaagcttccggggcaggtggaacagcatgaggcttccaacctgcatcagtagaaaatgacactggccaggtgtggtgaatcacgcctgtaatcccagcactttgggaggctgaggtgggtggatcacagggtcaggagatcgagaccatcctggccggcgtggtgaaaccccgtctctactgaaaatacaagaattggctgggcgtggtggtgcacacctgtggtcccggctactcgggaggctgaggcaggagagtctgttgaacccggaaggcggaggttgcggtgggtggagattgcgccactgtactccagcctggcgacagagctagactctgtccccccc

SEQ ID NO: 57975 - DNA, 625 bp, Homo Sapiens
agatcttttttttttttttttttttccacttccccaatccctcagctctaaatttatctggaaatattttgagtttttcttacagtggagaactatttgacttagggctacacaacaatgcttgccacctccgtattttgaagatcttcctctgtgaatccttcccacattcaaggaggtacgcaggaaaagcctgtggcaggcagtagcccttgatctaggctgctcagggccacgtagatcatctgaagattgtcacctaaatacagctgttactaaacctttgccaagggaaagcagagaagggacaagtcattgccatccctcagcagcagcttcaaggtcattcgtaagtgagagcccggaagttatgcaacactttctctctaggtcctccagacaatgatttttacaacagccagatggtaaattcacgtttgtggctattccactgccttgtcctatcagcatcaggcatgatggccatgggcctttcacgactggtgtggacacacatagctctacactgatggcacccaagtcacagcagggactcgtgtggcagtttgcatttcttatgataatctttttgttcacccaagtttttaagagctaaaggagacag

SEQ ID NO: 57976 - DNA, 434 bp, Homo Sapiens
  misc_feature (342)..(342): n is a, c, g, or t
  misc_feature (397)..(397): n is a, c, g, or t
  misc_feature (404)..(404): n is a, c, g, or t
ggcttttcttaccgaattggttaggattgtcagtacaagtgttgaattaaggtggtaattgtaggtaaatgtgtttgttctcaatactgggacaaagtttaaaatatcttgtttttgagtcttggttgaatttttttcttaaattttaaaaggatgttgaattttatgaagacatttgtaccgcatctaccaaaatgatgtattagttacctattgctgcataacaaattacctaaacattttgttggtgaggatatgaagaactggggtatcttcaaatgctgctgggtagggaatgtggaaatgggtgtaggccactttgggaaaagcttgtcatttccntcaaaatgtttaaacatacagttactgtgttcctaggcacttcttctcccggggntatatanggcggaaaggaaatggaaaaccattcattt

SEQ ID NO: 57977 - DNA, 619 bp, Homo Sapiens
cacgcgtccggggctcacgaccttttcagatgattaatgttcccaaaatttaatattcaaataagagaaaaacaatacaaaagcaccattgggttgagcatggtggctcatgcctgtaatcctagcactttgggaagctgaggtggacagatcacttgaggtcagaagtttgagaccagggccgggcacagtggctcacgcctgtaatcccagcactttgagaggccgagttgggaggatcacgaggtcaggagatcgagaccatcctggctaacatggcgaaaccgtgtctctactaaaaatacaaaaaatgagccaggcgtggtggcaggtgcccgtagtcccagctacttgggaggctgaggcaggagaatggcgtgaacctgggaggcagagcttgcagtgagccgagatcacgccattacactccagcctgggccacagagcgagacttaaaaaaaaaaaaaaaaagaagaagaagttcgagaccagcctggccaatatggcgaaaccccatctctactacaaatacaaaaattagccaggcatggtggcagatgcctgtaatcccagctactcaggaggctgaggcaggagaatcgcttgaacccagttggcg

SEQ ID NO: 57978 - DNA, 960 bp, Homo Sapiens
ataacggagaggagtagggaaataaagacctgtctggtccttccccacttccctaatccatctgtctcccttgctatgtctctaaaccttctccagccaggacatcggaggtacccagacattgttatgaaactccgcatgtgcccctggtggacgctgctggacccagcatgcacacttctcggctaagagtcaccctggatgaaccaccattgccagcggggagcatgttgcagctttcccacgcagtggatgagaacgaaggttacgaccattgtgtgggaggcgtctgtgtagcaattgctggaatcacttgtggcattgtagaaagactgagcgtgggaaagaagacgcattctgaagtcaccccgatttatgttaaattatcaccttgactactgctatagaacgaatgtttatgtcccccacccaaattcgtatgctaagacctaatagccaataagatagtattaatagatggggcctttgggaggtgagtggctcatgagggcagagtcctcaaaaccagataagtgcccgaataaaaggggccccagagagatcccttgcaccgtctaccatgtgaagtgtagaacacagcgagaaggccacctatgagccagaacgtgggccctcaccagaacccagttgtgctggcaccctgatcctggacttccagcctccaaaatgacgacaaagaagtttgtttttcctgagccacccacttcaaagtattctgtcatagctccccaaatagactaagacatctacttaaccttggtcaaacgtttaaccttggagtccacgcctctgaaatggtgacaataacactgtgtatttcctactttatgatcaggattaataaatgtaatttattaatcagaaattagtaatttctgattattaaaaaaaaaaaaaaaaaaaaaaaaaaaaaaaaaaaaaaaaaaaaaaaaaaaaaaa

SEQ ID NO: 57979 - DNA, 339 bp, Homo Sapiens
cgtattcccgggtcgacccacgcgtccggatacaacaagaatttaacatggcagccaaaccaacccactaacacacatttaaataagatacccaaatgcagaaagaaaagcacagtcgtcatgcaaaatagtcactactcattcaaaaactctatagttgtctgagtcgttatgctcaaaatatccaataatatttcttttgctgagctgtaaaataattattttgcaaacataaaagaaaaaaaaaaagaattgtaacagaaacatggctttaccagtatgaccctcaagacaaaatacaaaacaatggctaccaagaggtggaagtggcccagtcac

SEQ ID NO: 57980 - DNA, 684 bp, Homo Sapiens
ttttttttttttttttttcaaaaagaaagaagtaaaattatatttggtttgtagacgacatgatcttctgtgcagaaaatcacaaagagtcaaccaaaatactactggaactaagtaacatattcagtggatttgcacaatacagtatcagcaccaaaaattagttgaatttccatacttttaacaataaacaactttaaaagaaaattttaaaacacttccattggctggagaacttaaagtaagaaatacttagaaataaacgtaaaaaggtcagaggtttttaccttgaaatctacaaacattgatcaaaatgattagaaacatagagctacaacccatacttatggtttggaaaaattaatattgttaaatgattatataacccaatgtgatttagattcaacacggtacccataaaaatccttatcactggggctgggcgcattggctcacgcctgtaatcccagcactttgggaggccgaggtgggtggatcatctgaggctgggagttcaagaccagcctaaccaacatggagaaaccccatctctactaaaaatacaaaattatctgggcgtggtggctcatgcctgtaatcctagctactctggaggctgaggcaggagaattgcttgaacctgggaggcggaggttgtactgagctgggatcgctcattgcagt

SEQ ID NO: 57981 - DNA, 2972 bp, Homo Sapiens
ggaacactggccaaaggtatgtaagatcattttccccctctctttccctccccgtttttcccttttgttcccttctcttggtatataggtcgtcctccaaaatacaatgcagtgctggggtttggagcccttaccccaacatccccccaatccagtcatcctgactcccctgaaaatgaaaagacagagaccacattcactttccctgcacctgttcagcctgtgtccctgcccagccccacctccacagacgtaagtaacttgggaaaagcacactgtctttctgagagcttaaattgggaaaagcgttatcatatgttgtctccttatcgacttgcaccttcttgactaaccctggaacagcaattaaacactatagaatgctttttatgccatgtaaggcagctttcttctgagtttccaggccttccatgtccttgagaaacatgttaaatataacctcatggaactcagccagccttcagagtctgaatttgatctactgtgaatgagttctcagaaaacagatggggtggggagatcagctcatacagttgagaggtgtgcaggtttctatcatcagtgttttgggagtggggaaaatgaacaagacatacagtcccccagcagcccttgtttgctgcttcaaatacaattccaaaagtggaaagttttctttagagcaactgttgatcagaaactgttgagcagaaactctgctctttagagcagagttgatcagaaacaggttccggaaaaactgtcaaatacttagtagcccttcacccacaaactgcaggaatgtgaactagtgctctaaatgtttaaatgaacctcaacaaagctcagaattcactcagcagatactcactgagcgctactctgctgagcaagtgctattcttgaggctggggatacagcagggaacaaaaccaactccctgtcctcaaggagctcatctaaagaggcagataataagaaagtgaatatataatgtcaggtaatgataagtgctatgaagaaaaatggggccgggcatggtggcttatgcctgtaatcccaacactttgggaggccgaggcaggcagatcatctgaagtcaggagttcaagaccagcctggccaacatggcgaaacctggtctctacaaaaacacaaaaattagccgggcatggcgtgctcctgtaatcccagttactctggaggctgaggcaggagaatccctggaacccaggaggcggaggttgcagtgagcagagattgtgccactgcactccagcctgggtgacaagagtgagactccatctctaaaaagagatcaaaaatggaatggatttaagggcatatagcatactggcaggaggctgatgtttatgaagagtggtgaagcctcgggaggatctgggggaagagcctgccaggcagagggaacagcagtgcaaagccctgaggtgggagtgtacatggcatcctgaaagaaaagcaagagggccaggatagcgggggcagagcaagctggccagggtggtgggaaatgaggcctcagaagtggctgggccagttgcgcagggctttgtggctttcgttctcagtaaaatgggagaccattacagggttttgggcagaggagtgacataatttttcggtatttattttgaaaattttcaaacctacagaaaagttacaataatggtacaaagaaccaatgtatatccttcacattgattcatcagttgttaacattttgcctatgcttctcacctaccatacacacttattttaggggaacaaggtaacaagaagttgcagacttcatgaatcttcaccctaaaatattttgctatatatctcataagagcaaagatactgtcttatgtaggtacaatgcatttatcaaattgaggaaatttaacactaataaaatattactatataaaatatacagtccatattcagattgctccatttgtcccttacttacttttgtgacactttgtttttcctgcttcagggtccaattcaagattactcttgacatttattgtcatgatattgtctgtttggtaatcctttattttggaagagtttctcagtctttgtctttcataacattgacgtttttaaaaagatagccagttcttctgtagaatgcctctccgtttggattgtctgattttttttctcagcagtagattcagggtatgcatttttgcaggagcactaataagtgacgatgggtcattatcagggcatcacagcagggggcacgtgttgtcagtctcttctgttgttggtgatgttaactttcatctcctaagatagtttctatcagatttttccacctgtaaatgtgcctttttcctgtggtggagatagctttgagtctgtatgaatatccagtttcccaacaaactgttatctaatgatagcatcctttaatgattcttgcttgcatttattatttttaagatgtatgcaaaatcaacttggattttaaaaaggatcactgtgtcgaaaatatgcagaagaaaagggcctatagggaaaataggatggaagcaggaagaccagttaggaggcttttgcagttgtccaggcaagagatgatgatgggcaggcacggtggctcacgcctgtaaatcccaacacgttgggaggctgaggtgggtggattgcttgagcccaggagttcaagaccagcctggacaacatggcaagacccctgtctctacaaaacattaaaaaattagccaggtgtgatggcaatatagtgaaaccccgtctctactaaatatacaaaaattagccgggcatactggtgtgcccctttagtcacagctgcttgcaaggctgaggtgggaggatcacttgagcatgggaggctgaggctgcagtgagccatgattgcgccactgcactccggcctgggtgacagaacaagaccctgtctcaaaaaaaaaaaaaaaaaaaaa

SEQ ID NO: 57982 - DNA, 2946 bp, Homo Sapiens
ggcccctctcccccggggcgcccggcgcaccgtggggactacatatcccagcatgccgcggcgccggcggagcgaggcgaggcgcggtgagtcagagccgcacagtaaatatttgtattagccggagccggctcgctaatggtggacgcgtgaggcggaggcgcgggcggcggagggaggccggagcgggcagcgcggcggcgccatgtccgtgaacatggacgagctcaagcaccaggtcatgatcaaccagttcgtgctgacggcgggctgcgcggccgaccaggcgaagcaactgctgcaggcggcccactggcagttcgaggtgcgcggcgccggagccgggcgagggccggggccacgggcggagtgtgtcccgcgtggccgccgggcgggggcggacggcgtggacgcgtgccggctgtgcgccccctccgggccgcagacccgacccgctttcccgacggcggtgcccggcgtccggatcccaagggctcgcggcgggcggaggtgggaaccgggccaccggtcggggatacgccgcccccgcggggccgcgagtcccccgggatcgagacggggaccccccccaccccttttgtccgggtaacggccgagggccgggcggccccgcggtgcagacggacagtcgggcgggcggccggaaggaggacgccccaggcctcggcagagctgggccggagggcggagccgctccgggcgagtggtccgagggtccgcgtgcctggtgggcggtcggcggcgtgcgcacacgtccatgtgcatttgtgtttacgcacgcaccgcgccacggcgtcggccgggcaccggggaggtggcggacctgcgggcacgttggcgcgcgtgtgaacgcgcagccccctggtgcgtttggtgtgtgatcaacgcgtacacatgtggcgggtgtgcagatgccgcccgtgcccggcacggtgtgatgtgtgtacacggcctggagtgtaggggtggcgtgtcggagccccacactacaccacagggatgagcgtgtatccccttcagaggtgtgcctggggactccgtgtgcgcgactaggtgctctcctggggctggcaggggcatctgtccctttaccggtgcaatggggagggtgcacacggttcaccagctttcgggctagctgggtaggaggtgatgctgccccggtctggcacccacttccccgggcctctcctaacccataggacagtagtgctcctggcttgtgctgcccagaggctacctggctttccctaattcaccgaccccaggattaaccccatggtggttggtatcaggggatgaggccagagccctttgagctgtgcccctcacaggggtagggtcatggcctcagccatcccggtaccatctgtgcccagccggggactgggaacctggtttctccatgaggagccatcccagggcctgcaggagggactagaagccagaggactctgaggctccgcttcctggggactgcagggggatcagaatgtcccaagcttgggacagtctgggaaggcagtggccatcccatccagatgagtacatccctctctccttgcctacttccctcctaccagccgtcgcggaggccactgatcctgtgtggtgttcaccccaggacgtgggaggctgctctgtccctctggccttagtttccacatctgtatggtggggttggggggcatgagtcagcttctgttggccagcttactgccccctgtgccccaaggcagccccacccggaggaagctccctgcttccctcctggtctccacagccctcatcagccctgtttgtgtcaggggctggatgtggcaaaacttgcaaaaccgcattcatggcagtcacacatctgcacgcagggttccctccctgcctggggctgggcaggtaggtgtccggtgggaagcgggccctgcctgcaggactcagcccagccctcaaaacctggcacccagctggcacccaggccacatccctcagcggcacagttaattgaaaatgcagctttgaggagtgcaatgtctggggaaagactgttcccagaggggcaggagcatctggggcctctggtggctcccagggtccccatgggaggagccctgtgccctccactcccaagtctcagttgtgccatctgtaaagtgggggccgccagggaggctggaggaaggtgacgggacttcaggccttggaatggggctgagtgaggggttcacatggccaccccatccctctccacgctccacccgctggctgcatccaccaggcggtgtttctgggtcacatttgctgcaattcaggtgctaatgggggcaggaggctgcagggggaggggccggtgtctagtggggcagatgtttctcaatggagaatgctcacagcggcctgcagagggggtctggtgtggcctggggctcctggggttgggatttacacagtgagcctgggctttggggcacagctgctgctgacagagggtcttggggtctgggaaggtgcttaaagcccggcccccatgcctgagctcccacacccctgtttagggacacccagatagggtgtctcctgcaggaaattccccacataattcatttatttaaaaaatattttttgccgggcacggtggttcatgcctgtaatcccagcactttgggaggccaaggtgggcggatcatgaggtcaagagatcaagaccatcctggccaacatggtgaaaccccatctctactaaaaatacaaaagttagccaggtgtggtggcacgtgcctgtagtcccagctactcgggaggctgaggcaggagaatcacttgaactagaaggcaaaggttgcagtgagcccagataacgccactgcactccagcctggtgacagagcgagactccgtctcaaaaaaaaaaaaaaaaaaaaaaaaaaa

SEQ ID NO: 57983 - DNA, 165 bp, Homo Sapiens
tttttttttttttttttattttgttctgttttatttggtagagcaagtgatcaaagtgaagcttgagtgattggcgccgttggcctggccatgggtagatcccagcatgtcccgcctcccactgcagctccgtttctcggtcacggatgagacaggtggcctgag

SEQ ID NO: 57984 - DNA, 1079 bp, Homo Sapiens
ggcacgaggctaaagtaatgagacaattgggcagatatgggggatatcaagttactctgtttcacttggatgcttaaaacagtgtcaaagtggtcttcctgcctctactttgacctctccatctctgtttccacaccaaggacagagtggtctttttaaaatctaaatttagcccttgagacgcagcttgagcttgaggcatgcagggctggagacacggcagaccttcaacccagagcaatatgaggtggtgagcaaaaaaatggaaaggaaacaatagaataaaaaagttggggccgggcacagtggcttacgcctgtaatcccagcactttgggaggccgaggcaggcagatcacctgaggttgggagatcgagaccagtctgatcaacatggagaaaccctgtttctactaaaaatacgaaaatgagctgagtgtggtggtgcatgcctataatcccagctactcaggaggctgaggcaggagatttgcttgaacctgggagtcggaggttgtggttagccaagatcgcgccactacattccagcctgggcaacaagagcgaaactccatctccaaaaaaaaaattgatgcagagcctgaagaatttgtagtggaaaaagtactggatcaatgtgtgatgaatggtaaggtagtgcatttcctgatgtggaagggatttatagatgctgaaagtacttgggaacctgaagaaacttaagcttgtcaagagttacttggaacatttaattctcaaaaaagctgttaaagaaaaagatgatacaagaagaaaatatttacctgacagttggataacataaaatcaaggaaagagatactgcagacaaaccaagagaccttgatcctgaaaaaaataattggctatgcagacagcagtggagaattgatgatactcatgaaatggaaaattcagataaagcagacttggtgttagcaaaagaacaaaacatgaagtgtatataaaaccgggctcttgctttttgctttactaatgtgaagaaatagctgcattctaataaaaatcaagtttgatatgttcaaaaaaaaaaaaaaaaaa

SEQ ID NO: 57985 - DNA, 762 bp, Homo Sapiens
gcaaggttaatttggctcatgtttctacaggctgtacaagaagcatggcgcaccagcctctgcaactagtgaggtctcaagcggcttccgctcgtggtggaaggtgaagggtagcctatgtgtgcaggtatcacagggtgagagaggaagcaaggagagggtgtgtgtcaggctcttttaaacagccagctcttacagcacctaataatacaggaagaactcacccctgaaggaaggtattgatctatttatgagggatccaccttcatgacccaaacccacctcccattaggcccccacctacaacattgggggatcatattttaatatcaggtttggggagacaaaccaaaccgtagcaatgcagctttatatttttacatatagtaaatgatggtgataatatcaatgacaggaaagacctcagttgggcattctttaataggagttgatcaccatcttggctttaaagaattttcattaactatactgtgctttcccttgactgaccaactgagaactcaaaccgtgttgatttttgctggtaagtatttgaattgttagttgacagtcaagccagtagctgtttgaaaaacctttctttgggacactacaaaagcaaaatataagtacctacaaatgcaaagaaaatactactacctgaaatcctactgtatatggataccactgttatatttgatgaatgtgtttcacttagtggtctatgcaatgcattttacgtaatgctgtcatacatactgc

SEQ ID NO: 57986 - DNA, 3768 bp, Homo Sapiens
agcggattagctgctagactcactccagtggtgggcagctgggcgaaaggccctgaaagttgctcttttctcaaaattcagcctcatgtaaatttaccctgtgacctgccatgggggattaggatgggctggccaggccaggctaggtggcctgattttcccattcagcttctgacctggtcttctgaaagtcagactctggccctcttcattagccagcccaagtccttgcccctgggaatgcagggtggctggctgtgtaggtgttgatcatcattagcgataattagagggcagagctcagggaacaagttatgacacctgcaaactaggggcctctggaaatgggacagaaaagtttctcactttggggacaaaccagggaagcctgatttgttgctgatacacagggtggtctctgtcaacgttcagaagttctggacccagccaatgtggtgaaaatgccacagtaacgtatgacctgcaatttggggttccatcagatgatgaaaattttatgaagtatatgatgagtgaggagttggtgctgggcattttgctacaggatttccgtgatcagaatatacctggttgtgagagtctggggcttgatccaacatccctcttgctctatgaatgaagtgatggaggctggtctctgtctgaaagcagtgctctaccaagtcctggagatgaagggaattcactctgttttgcagaaaagattctgtggattaatacagaagcaccagcaacaccagaggggtggagactcctttctctcccgattctacagtctggctctaagcccagtaaaacagctcccgagcactgcttcagctgggtccagtcttgacaaaggaagtaggactgaagccgaatcctgaagcactggtgggatttgaataagaagatttgccttcctttacacatgttcgtgtcttcttaggatgaggatgaagatgatactatcaaattcctaatcaggaaaaaagctttctgctgtgttcccagcaaaggaaaaatgtttcctcactctcaattctggtaatttccttggttcccttgtaatgaagaacacgtaagtgttatccccaggaaatcaaggtacaagtgtatggaaattttacaaatcatttttttcaggtatgggttaggcaatatcagtattttactatattctgaatttctccaatttacagtatattgcaattgtttgctcacttgtctatattctacactagaatgtgagcttcacaaagctggggaccatattgatcttgttcatcgtggtatgtatttccagtctatgacacaacatctggcacacagtaaatgggttttcaaaaaatatttgatgaagatatgaatacagaatgaatagccaaggacaggacaaccctggtgcaggaggtcagcaaatctaccaccttgactccaacgatatagttaaataacaggacttctctctcttatagcacaaaggcttagaatctctctgcagtcctgcatctacattaatgtataagtatcattctgtacatttttctgaatttgaggcatagtcaactacctacatggttgaatgtgaaagccctttataaagtagtatcagttacagtatgtaaaaatgtttggaaaacaccatccaaaaatatctccccccgtgagctttcccatgaagtttcatcaggaggagcagtggaggagaggctgactgcatcgtgaccttggctgtgatcacctgcttggctgagcattctgacaacctctaagatctatgcatcatcaaagcctttggggcccagaggcacagctgcagctcttcctcttctttaggttaccttcaatgtgcttcagaccgtttgcttacattatctgctttgttgctaaggaaacatcgtaagaaaactactgaatcacaccaagttaacaaaccagattcactgaggagaaatgaatgagataagaggagggggatgattttgagagatattctctgaactcctgaggccacagtttttaaatctataaaagaggatgtatatactgcttacacatggagttataagaataagctgaggttaaatatgggcaaaaacgatctgtaagctggctgtttctcctacttgacttttctgcagtttattcttgcatttcaacatggtggttttggtttgggatgggttcagatagcctccaagaagcaagctagacaaatctctatacccttaggctacgtgtcaggaatttgaggtatctgtctctttcacaatgccttctctggctctctggtctacccaacctctcccttgttataatgccgtggcccttctgatttatttcatcatttgaactgtatgccttaaaatatgcccaatgatacccctgaaaatatgtaattctcaacttgaactgaaaaaattcaccctgttgaaaggaatctctgggtctccagcccctaacgcgggcattggtgttagaaaataacaacagtgcttgttttttaattgctcctctttcaaaatctcctcctgaaaccatgtgaaaagcacagataactttacaggccacagaaaaactgaccttgtcagcccttaggattcttggatcctggaacattagttccatattttaattattcctttccttagagagaattctttagggctggacatttgaaaggtctgttcaaaaagaattaatgaggtggtctttgtttaacaacatcagggcaatcacaatggtgtctccacaaactttctaaaaattgtcgtaacatggggcatgtggtcacttcagaaatagacacctatagcttaaaataaaatggctagggtggaggttgagcacaaaggtacctgagatagacaaacaaaatgacaacaggaaataagaccttttattttataacagggcataacagggactagcagggtcttagttcctgttgctaggagttacattaggcttctagcaaagtagcatatctcctgtccaaagttttcaagcattttatcttttgtcctgtcttcacatttgccactattgcaactgctactggtctaaacagggccctctctcactgggatgtgaagtccagggcttgacatacttcgttctccttgggctaggtctggggggtgtttggttgattttgctctcacctggatgttctctgtttggggctttgcattctcacattccaaggcatctcttgagtgttctgctgccgcctgaaactcaacatatcagaaacaggctaagtatttcctaaacaggcctgtcacttcttttcataatttttccgactttcctcatttctgctatttgtgtgtaactcagaaattgactggttgccctcacacatgttaatactgtttcctcaagcacatgtcgcaagctacctttgatctgacatgctctccattgccacagcaacagcccactgatgttctccaacctccatgaacaagtgatcctaaatcatctgatcccaaatatccagggatcctcgtcatgacccttgagagtatccgtgtccagagagaggcctgaggtcctcagctaccatctctttggtgcagttccaggagctatgcacaagtaatggggaaaggtactggctttgtcttgtgtaaatcacaccatctttcacagaaagcatggaggcccagaacaagggacagaaggagaagaaaaggattgaataaagaaaataaattggaaaaaaaaaaaaaaaaaaaaaaaaataaaaaaaaaaaaaaa

SEQ ID NO: 57987 - DNA, 3863 bp, Homo Sapiens
atatgttcatattttagctccctaaataaactgagtgaactactatacagtaactattagagtagaaataagatggggcaagagaagttaacaattacttatacaagaaaagtaaatcaataataaaataaatgtgtaatgagttggtgttctaattaaacataggatcaggacctttcacactcatctaagcagttagaaatgagcctcatagaaaccagatgtctctctttttataattaaatgtatttgtatatgccactcttgatactcctgggaatgaggcagggtatgggcgaaaaaacttttttaaaagatacgagcaagcaagactttgaattagaaatattacagctccttctttatgtcttaacagtttctgccaccagttgactcatcaccagggagaaacagaggaaagatcaggggaaaacttgtggtttgtttttgttcagttgcttctttttgtaaggtggtaagagcatgaaattctgcctaaagtggtctagtcacaaggtgaagcaagatatttcggaaagttatttagttagtgtgaaatagctcctagaaaacaagatcctgctcatttaggaaatgggtgtcgcataggcacctgagcaagggtacatttcctttactgctgacacatgcattccctcccccatcaaccaaatgttcacagtgaatcagatcatctgtagcataatgttcccttaatggtttcaaatccagcaagatacttatcagtgctgaggaccaaagacatcaccagtatatgttgattcattcttttattgtctttatagggaacctactgagggtcaaacactacatgctaaacaggctctgggaatacagtggacacttagatgaagtcttactaccaccttaaaccttctataatctttgttttgtgcagaaagaagatagttcaaattctcaggtatccaagctaagagagaaactccagctgatcagtgctcttacaaacaaacctgagagcaacaggcctccagagaccgccgatgaaggtgagagcagagccggcttcttaatatttcatggaggcttgagcagcttgcctctcacatggggagcagggaaggtgttccagcagtactgatcgcaccaagcgagtgatgcctgaacgcaccgagatgaagctgatacactttgctttcatttagaaaaggcccattttgtacatgatttgtactctagtctattaagggaagaattggtaatgtttagctggaaatagaattctccatgctgtctgcatccaattataggcaaaaatgttactgtcatagagtatattaagccagccctaaaagttgtttatgagagtcttttcctttctgtaagtgcataacatgtatttaaaaataaatattcgtccttctgaaaatcgttaacaaaaataatgatgggatctttgggttggaagggtctttggctttaggtatggacctgtctaatcaatattagcagatacatgagcctccactgatttagaccctgtgaggacataaccaaggcactggactgtgttagctttgaccttttcccccacacaagtatttttctattttagaaaagcagtacaaactctcttgaattctcctttagtaggagacagaactgtggtggaatgtcttgtcctaacattgtgctacatcatcttacggttgcactcttagcaccagcttagcgggtggcacatacccctagactgggtttaaagcacatctcccaggatgtcaagatctttgatatccagccactgttcttgccacttgacagcttaagctcttaccatctaaacatgtttaatgctagcttgtactgtaagatcttctaatgggactgctgctgcaaaccttaacgtaatataatactgattggtgttcccttgcccacaaatatgtctcaatccaagcctttaacttcacatagtcactatgctactttatcttcaaatgtttctctaaattaattgtatatccaattttcctaaaaggtgaccttcgatactagtttaatttggtgttagattcaataatactaaataaaaccttatgtatttgttacagagcaagtagagagtttcacatcaaagccatcagcattgccaaaattttcacagtttcttggagacccagttgagaaagctgcccaactaagacctatctccctaccaggagtttctagcactgaaggtaaatttttataccacggggtagtaatgggaatgttccaaagtaataactttttaatgtttattttcacttgtcaaaaatatatatgatctaacatttattgaggagatatcaagtgccagatactttatatgcattatgtcatataatcctgataaccatcccatgaacataagtatttatgtattatacccattttactgatagggaaactgcctaagtccacacagcaaataattggttgaaacagaatgcaaaccaagacagtctgatgccaaagcttgtgctttttttttagacccccaggctggagtgcagtggcacaatctgggctcacagcaacctctgcctcccagggttaggcagttctcatgcctcagcctcccaagtggctgggacaggtgtgtgccaccatgcctggctagttttttgtatttttggtgaagatggggtttcaccatgttggccaggctggtcttgaactcctgacctcaagtgacccacctgcctcagcctactgaagtgctgggattacaagcacaaaccaactcacctggccgaagcttgcacttttaaccagtgtactatattatctttctgttaatgttttttagggtcttcattcactgagtgcctcattaaacctagtgctaagcaataagaatacagtataagatatggtctcattttctttcttcaaggatattacagtctaatggagaaggcataaaagcaaatacaataccatgagattagtaaaataaagtaaaagttgaccctgtttgtcagggccctccaaaaatgaaggacccttttaccgaaaatcagcaaaatattagtacaaaggatatgattcacagaaaaatgtgtttgcactgcttccagcagtgcatgttctatccctcatggtgatgtttagtgcctcccgattttgtattagctggctgcctggcaaatcacttgctcctgtccaccacaccttcctctggctcttctctttagcctagataccattctaccaggaacatttccttacctccagtgactggattaggctcctcctgtgtgctcttaaattttgtttgcccctgtttagcacatgtcactctgttggaatttcctggggagatacaaaatataacttcctatgggtaaggactatgtcttgtttactcccagcccctagcacagtacctggtactcctgaatatttgttaaataaatgaatgagttacctacacattacaattaaatgcttaaagcatagaagacttaaatttttctatcaccatttaaatgtgattacttttcttccctgttcctgacttttttttttctgttttctggggaggaggggaagtgttgtgtttaatgggaacacaagcttcctgccactttccattgttaaatcaatatttgatgagaatgaatgggggaaggctattaggtcagagtaaggaatagcagtcttaacacttgtgcttcagtcctcagcataggccttaaatacttttggatgactatacttttggaatgacctgaggcagcaatcatatttttatttgaatactgctaccaagtgcgtagtgtagcatgttgtataaactcatgccgcaaaaaaaaaaaaaaaaaaaaaaaaaa

SEQ ID NO: 57988 - DNA, 2628 bp, Homo Sapiens
cggcccctgggtcttggtttccaagtcaggctttgcaagcctgctgtgtcaagccctctctcggcaccaggccaggtgggccagggtcagccctggggctgtgatgagtgtgagtgcccctaaagtgtgtcatgtccaatagctgcctcctctctgggcactgcctcccagccagatatcctacagcccccgtcccagccacagacagcaatctgattccctcatcctcggcaggtcctggggttggggtaagaatttgtcactaagtgcagatgttcccagagggtgctggctcagggctgcgtggattacagccctttcatccctgccttagacccacctgcaactctggagaaaagatggcccagtggacgcctgcggggaggagggagctggtccccaggatgagcagatttgggggcagtccccatcacgggaccggtgacctactgccaccagcgccagtgaatggcagaggggccctggcataaggcctgggttcagaatgggaacctgcagagaaactgtcaaggtctcccgccacctgacacctccgcctggctgccaccctagaaacacccttgctgcaagaagatgggggagtttgtctggggcatggtctggcgacaccaacttgagaacctcaggcctaagtgttggcctctgggcctcagctgtcctctgagctgtaaagctggctcctgggcacttgtggaaaacactggactctttattttattttactttacattctgggatacatgtgcagaacgtgcaggtttgttacataggaatacaagtgccatagtggtttgctgcacccattggactcttcaatccagctccactagaaatgactgccttctttcccttcttccgtccctccctcctcccctcccttttttccttccttccctgtttccttccccctccctccttcccttctttcccttcctctcccgtcctcatggggatataatttccatattacaccatccgccgattcagaaagcacagttgagtggcattttttcacaaccttctataagcatcacctctaattccagaacgttttcctcaccccaaaaggaaacgccatcctcggtacacagtcactccccctcccccagcccctggaaatcaccaatctgcgctttgtccctacagatgtacttattctgaacatatgactagaaccctaaaagatgtgactttttgtgcttggtttcttgcagttggaatgttttcagagttcatctgtgttggcgcacgctcgtgcctttttatggctgagaaatagtccgctgtgttgactcagcacgttgggtttctccacgcatctgttggcggatgtgttagttatttctggagccgggtgtgttgtgctactcacgggctgcactaggagctggggatatcactgagtaagccacagcctcgggcacccaggagctcgcagagcaggagctgggagggaggtcaggaggtgcatggcctgtttgccaggctggagagacttgcaaaaagtcactttgagccagaaaccagagcctgaggcctctgactcccagctgcggagccgggagggaagctctgcattttgctttgactgtggggtgacgtgtcagttactgtccaaatcagaacctttctgagagtcgacgtgggtactgctgataattagtctggatacccgaaagaatggaaagcagggacccagacagatccttgcacaaccgtgttcgtagcagggcgaggcctggaggtgcgatggggatctcaacggggcagctgccgtcttgctggagcccacggtctttggggggggtcacaggtgttaaccgcatatcatacaagcaggagtgtgaaatttcagggttgccaaattcagtgagggtcttgtgctggcctggccacttacagtggcatttcaggaaaaaaaatcactctatggacctcagtttccccattagtaaagagtaggttggactggaattctgtaccatccagtatagttgccatttatgaaatgtggctatttaaatttaaataaaaatagaaattccgttcctcagttggactagctcagtgtcaagtgctcagaagtcacttgtgaacacactgtggcaattcctcaaaaaacgaaaactagaaccaccgtagcatcccataattccacttctgggtgtggattcaaaagaatgcacagcatcttaaagagctagagatatttgtacacccacattcatagcggctctgttcacagtagccagcgggtagaaacaacccgaatgcccgcggtcaaatgaatggagaaatcaaaggcgggacaggccgggcgtggtggctcacgcctgtaatctcagcactttgggaggccgaggcgggtggatcatctgaggtcacaagttcaagaccagcctgaccagcatggagaaaccccgtctctactaaaacaaaattagccgggcatggtggcgggtgcctgtaatcccagctacttgagaggctgaggcaggagaattgcttgaacctggggaggcagaggtttcggtgagccgagatcgcgccattgcactccagcctgggcaacaagagcaaaactctgtctaaaaaaaaaaaaaaaaa

SEQ ID NO: 57989 - DNA, 224 bp, Homo Sapiens
  misc_feature (32)..(32): n is a, c, g, or t
  misc_feature (119)..(119): n is a, c, g, or t
  misc_feature (142)..(142): n is a, c, g, or t
  misc_feature (167)..(167): n is a, c, g, or t
  misc_feature (207)..(207): n is a, c, g, or t
cttcttccattgtttttctaaaaatgaaagtnctgggagctttagactcgggccgcaggttttatggtaaagtgctgttccagtaaccttgtcaccaaaaggtgcaattaaaatgtttngaatcattatttttagttcagtnttagattttgtctctaatacagatngtccggaggcaaagctgtgaaatctaggggggagaaaagngaaatcaacaagaacca

SEQ ID NO: 57990 - DNA, 908 bp, Homo Sapiens
aaaaagtgacaagatgggagataattgggtgactattagaaaccaatgttaactacaagaattcaaagtccaggtgtagcccagaacgaggtttcttccatttggtgcctcccctgtcttctggggcctcagagtctgtccttgtcccctctgttgtccacttgtgacagcagacggggagagagaggtagtggagggtcacaaggggtctcaagggccagaccttcaagtggcaaacatcatttctgccctctttccattgcccagaattttccactggcccactgtactaccaggagagattggggtagggcaggctgagaaatatactactcctgtgtgctcgggaagaaaatatattgtctctgccttgtctggactctcagtttaccttctctcctctgtggtgtgtttcaggactaggatctgagctcatcacttaaggagttgtcatagctatccttggtcatccctaacttgggagcctcccaaatatctaaggaaacaggctggtggctctagttctcttcacaattaacctccaggttcactttcttagtctcacacctgggactagaggaaggacttaaactcatacctaacttcaccttttgatcttgatgcccctgggtgtgtagtgccagtcctgagcccttggtcatggggcctttcctgtaccctcaggacccctgactcatggcttccccaccccccaaccccatgccattgccaattctctaaatgcattcacaaacacaaaagaaaagaacatctttttctggaaaaagacttcaaacatgtaaaaacaccttttattatttgtttatttgtgaatacaagggtgtggtcttttatctaaagcattaaccaagtggagggtggcaggttataaaaaaaaaaaaaaaaaa

SEQ ID NO: 57991 - DNA, 386 bp, Homo Sapiens
tttttttttttttttttttttttttttgccttaaatacataaaacttttatttgccaattatactccaataatgcaggacaaagtatacaggtctgacatccagagaaaaatatcagcagacttaaaatatctgatcattttcccccggaggaggattggacagtttttttaattgatgagtaacaattttatgtagtaagcctattcactctctgttaaccacatttattgcaaacaagtttttcccaaatgtttagacatttattcctacttattctcacacttccctgataattcactgaaattgcgatcaaggctttattctcagcaggaagtacttgtacttctctaagtgacagacaggcttaaagagtgggctcaaggg

SEQ ID NO: 57992 - DNA, 466 bp, Homo Sapiens
  misc_feature (466)..(466): n is a, c, g, or t
ttttttttttttttttcctgttttttaagattttattttgttaccagagatagaagagcatgcaaaatcagaaacagctgattaccagtgcccttacagagcatgcctattaaaaatccccaaaacattataaattaaagaggcagtaatttaaataaattacctttttattgaagctatagatctcaagagtgcctgtgtcctacaaggaacacatatttcacaactgattcatttgccccttactctgagcacatgggataataaaagaaagttttagatcatcattatccaaaggataactttgaatgccctttttcagcatgcttctgaaaacatttcatatctcattcaatgccacatataaatggtatttgctggacagtgtggaaaacagaaacatccgtgctaaaagccaatggtaaacaccaagtttaaaaaatggattgcaaagatcgcatgtccn

SEQ ID NO: 57993 - DNA, 472 bp, Homo Sapiens
  misc_feature (6)..(6): n is a, c, g, or t
  misc_feature (40)..(40): n is a, c, g, or t
  misc_feature (108)..(108): n is a, c, g, or t
  misc_feature (164)..(164): n is a, c, g, or t
  misc_feature (185)..(185): n is a, c, g, or t
  misc_feature (362)..(362): n is a, c, g, or t
  misc_feature (417)..(417): n is a, c, g, or t
  misc_feature (448)..(448): n is a, c, g, or t
ttttgncaatgtatctaaacaatctgtacatgactctganacaaagattttctcctggtttggcttctagaactactagttttatgtctagttctatcatccattttnagttaatttttgcataatctgcaaaatatatatcaaagtccaacgttctggcatanaatacctaaccattcaggacnatttactgaaaacgctgtcctttctccgctgaactgcccccatgcctctgttaaaaaccgcctgatcatgggggatgggtctacttctggactctgctctgtcccagtgatctgtatgtctattctttcaccacactgtcctgattgctgtcgctttgtattaagtctcaaaatcanagtgtgagtcctttctcttgcaaaattgttttggctactgtactttgatcttgtncaagttttagaatcacttgattctaaaaaanctgcttagatttttcggaattcat

SEQ ID NO: 57994 - DNA, 525 bp, Homo Sapiens
tggagtcaaattttcaactgtgcatttattggcctgggcttagacatattaaaaagcaacacttactgagaacataacataaccagacatttctgccaggtgctgttaggtaaagaaaaaatatggacctctatctcaaagagtttatatcctagtttacaactaattggcaaacactgtaagcacacaccaagaagaagcacagtggtacagaggcaagagtgacagactctgtctggggatcagggagggattcatgtaaacaaggggtagagggtcaatcctctatttccgggttggtggatggtggtaccaacaattaagatagagaatccaggaaaccaagcttgatggcattagaaagatttcttgtaaaaagaggcaaggttatctacagactcctggaaaggatggtgacagaattgaagagactgttagcttaccaggaaaagaaactgctagtcaaagagaataacttttccagatatagaccacattttgttcacaattataagaacagctctg

SEQ ID NO: 57995 - DNA, 999 bp, Homo Sapiens; identical to SEQ ID NO: 26653

SEQ ID NO: 57996 - DNA, 1299 bp, Homo Sapiens
cgtataaggtatgtagcattagtatccctactttacaaatgaagaaactgagtcacagataggttaaattactagcccaaaaccacacaatgccagagtcaggatctgaacctctgataccgtggttctcagtcacaactgttctgctgggcacatgttcccccactctctttcctgtttgctcagtgtaagtttttatccattcaaaccccctcaatctggccctcagatgacaacaatggaagcagtggagtccccggagtccctggccgccgttgcttacctgctgaaccttgtcctgaagcggtgagttctgcctcctgtttgaaccccaaggctttttgtggaggggagaagggaatgtggacaggagaaacaggatcagggaattgttatttaaaaagatacttgctcttcatgaacattgtctagaggcatgcagaatgggccagcatgtgacataccgtcgtaggcctctagtgagaaactctaactaaactaggctgtcctgaacccctggtaatagaatcatttacctttatgccaagaaggttgggaaagcaccaaaatcttcacgtggtgtgtgtccaggcagacattcaggagctcgtgctgtgagatctaaagttgttatttgatagtccaaaacaaaaggcatgtctatagggcctgcagtgcttccctggttccatgtgtgctcagtgtgttcatgacagaatcaagtgtgctttccttattgaggagcagaaaatcattgtgaaagtgttgaaggcaaaagcagagtcagaaagctctattgaaaatgaaacttttttggcctggtgcggtggttcacacctataatcccagcactttgggtggccgaggcaggcagatcaagaggtcaggagatcgagaccatcctggccaacatggtgaaaccccgcctctactaaaaatataaaaattagctgggtaggctacatgctgtggctcacgcctgtaatcccagcactttgggaggctgaggtgggcagatcgcctgtaatcccagcactttcgggggctgaggtgggcagatcacctgaggtcaggagttcgagaccaaactggccaacatggtgaaaccccgtccctactaaaaacacaaaaattagctgggcatggtggcaggtgcctgtaattcagctactcgggaggctgaggcaggagaattgcttgaacccagtaggcagaggtagcagtgagctgagatcatgccattgcacttacagccctgtcaacagtgcaagactccgtctcaaaaaaaaaaaaaaaaaa

SEQ ID NO: 57997 - DNA, 1185 bp, Homo Sapiens; identical to SEQ ID NO: 27178

SEQ ID NO: 57998 - DNA, 885 bp, Homo Sapiens
gggggcttcgggttggtgtcatggcagctgcggggagccgcaagaggcgcctggcggagctgacggtggacgagttcctagcttcgggctttgactccgagtccgaatccgagtccgaaaattctccacaagcggagacacgggaagcacgcgaggctgcccggagtccggataagccgggcgggagcccctcggccaggttagtggggacatgcgtgagcagaacctcttgctcgtcctgtcccaccccggttgggttgctgacctcgcctggggtctcagggccaaggcctaaggatcgccgacctctgccccccagtcctttcagcttaacttactctttcatccgatgtttactgagctcctgttccgtgccaaactctgtcctaggcagggagcgtatgttggtgagttgtgcaaaaatctcttcccgatctaggagaactctcacgttcttgggtgaaatcaccgcctgcagttcggtagaagagagataagtgctggggagggaaaggaaggacagaggggctgaagagagagttgcaggggagccgagttgctctgttagaaggagcggaggctgtgctcggtggctcacgcctgtaatgccagcactttgggaggccgaggcgggcagattacctgaggtcaggaattcgagaccagcctgaccaacacggaaaaatcatgtctctactaaaaatataaaaattagccgggcgtggtgggcacctgtaatcccaactactcgggaggctgaggcaggagaatcgcttgaacttgggaggtggaggttgcagtgagccgagatggcaccattgcattccagcctgggtgagagagtgagactccatctcaaaaaaaaaaaaaaaaaaaaaaaaaaaa

SEQ ID NO: 57999 - DNA, 2412 bp, Homo Sapiens
agcgggattacaggtgtgagccaccgtgcccagcctgcatgttgtaatttattaaatgctttttcaacatctgatgagatgattgtatagtttttcccattattctattaatatgatgtctaacactgattgcttttcatatattaaaccagtagctgttggattttgtctgattccagatgacctatgctacctcctagaggagtaaataacattttccacttctgacatttgtggggttttttaatcaattctgaattttatttttgtttacatgagtatagggctctaattttatttttttcccaaaacttcctttgaatattattctagatcttactctgttccactggtctaattgtatacttttctgctaacatggaattattgtatagttgacccttgaacaacaaggggattgggatgccacctttgcaacacacacagtcaaaaattcgcatgtaacttttgactcctccaaaactttactataacctattgtttaccagaagccttaccaataacataaacagttgattaacacgtattttgtatatgtatgtattgtgtactgtattcttacagcaaagtaagctagagaaaagaaactgttactaagaaaatcataaggaaagaaaatatatttactattaagtggatcattataaaggttttcatacttgttatgtttgcattaagtaggctaaaggggaggagtaataggaggattttcatcttgctgtctaagaggtgacagaggtggaagaaaatctgtgtataaatggacccacacagttaaaatctgtgttgttcaagggtcaattgtacttaattttttgattgtttttaaatttttaaatagataatacattgatgtacaaaactcaaaagttacaaaagggtttgcaatgaaaaggaagtccctctttcacccttatttcagtcacaggtgttgctttcagttctttttatatttttactggggtagctgctgcacctacaaacaaacatatttgcctcattcttttttagcagctacttagtaggcaattgattcgttggattctgtgttattaaatattcccctgttggtcaacatttgggtagtttcttgctgttgaaaacattgctgtagagaatattctgtgatatatatcactatgcacttgtctaaatatagccagtagttttataattcctagaaatagaaagtgcatctaaatattttttgtagatgttgccaaatttccctctagagaaaggtgtgtttgctaatttataatcttacaggctctgtaagagactgttttttcctcctgtgccttcaacgataccatgtgttattaaactttttgatcattccaaattaacagcgaaaatttataactcattatagttttaacttgcacttctcttatgggtgagggtgaagtttgttgttgttgttgttgttgtttttaaaaatatattttttaaattataaaagcacatcgttatttatttatgagcggagttttactctcgtcactcaggctgggtgactatatatgtatatatatttcttttttttttttactcttcaaagttccttgagctttttattttgaaatttggtggttgggctttttacccttttttatagacttaagaaatttagcactttgtgatataagttgtgactactttttccattgtgattgtcttttgagtttttttatgattggtgttgcacattagccatcagttcttttttattgctaagtaatgattcatggtatggatatatcacaatttctctaactattcgaattatttaagagcattttggttgtttacagtttctggctatcataaataatgttatcctgagtattcatgtacaggtgcttgtatggacataagttttcttttctccaaatacatgcccaggaatggaattgctgggtcatatgtgtaagtatatgggtttttgggggtttttttttgggagaaaataccaagttgtcttcctgagtggctgtaccactttctgtttcttctggtattgtatgagaggtccagtttttctctgtctttgccagcatatttgttattgtcactttttttatttttagatgtttaagtatgtatgtagcgataactcattttggttttaatttacattttcctaatgactaatgatgttgaacatctttccacatacttatttgccatctgtcgacatacttatactctttggtgaaatgtctgtgcatatttttctcattctttaattgaattacttgtttttatattattgacttttgagagttcctttgcatattgtagatactagttttagtcagagatgtagtttgcaaatgttttcttccagtctgtagcttgtatttcttcggaaaaaaaaaaaaaaaa

SEQ ID NO: 58000 - DNA, 2145 bp, Homo Sapiens
caggaagaggcttgtgccgttattctgctggaacatggtgccaatccaaaccttaaggatatctacggcaacactgctctccattatgctgtgtatagtgagagcacctcactggcagaaaaactgcttttccatggtgaaaatattgaagcactggacaagaggttgcccctttagagaaggcgtgtattctccagtttgctgctgtgcccaccttagtacttcctttactcaggcaaccttcctttgtgctttgacccatttggagcaggagtgcctgacattgacatctgggatcctgacaccattgatagaagtgaatcaagcaagtttgtgccacccagaagaaacctccacctgcattgggaagctctggcgactgtacccctaaaactcttaattcctcaaatgttaatgtttgccacaaatagtattgtcaaatggggattaggtacaattcaagagatttcttgattattggacataacatacagttttataatacttctcaaatgcagatggtcatggagtccttctcttggggtataatacttctggtaaagcaaatattctttggaatatagtttaagaaacactgctttagtgagaataatttagatcattaatttatgtaaaaaacttaaaatgtttgctactatgtcttagggttttgggggtatagagacaaaagatacagaccttgcctcaagaagctcttggtttcagtgggacacagtgaaatgattacaatgtaccatgctaagtgctgtgatcaaagcaaggattcttgggactggtaaatgtctaaagtgagttttggcaatgaccacagttaatccggggagacagaggaggattgtttgcaaggcaaagagcagcacatcagaaagcacagagtgagaaggaagggactgcttttcttttacttcctttctatattgtatgttgaagttcaaagcaccttagagaagattttcagttcagttgagaaatatgtaattttctgaattactaattttttctgctgttttataggacagtaataccccacttttattcgctataatttgcaagaaagagaaaatggtggaatttttattgaaaaacaaagcaagtacacatgccgttgataggctgagatggtacagtagttcttttttttttttaaataaaaactgtgtattctagagtggtaacagtcactgaagtcagaaatattaataagaagattaacgtaattattggcatatagtgaaaaatatcaccatgaataatcagatagatcagcaaatatttggactgagtaacataaagaacagtatatagtaggattcatcttctcctaaatatagagtgtttgttatttataattggatgtttttggtactgtaatcttgtattagctaaagggttttgtattagctttattaagtttttttggagatgcaatctggctctgttgccaggctggagtacagtggtgtgatcttggctcactgcaacctccacctctcaggctcaagtgattctcctgcctcagccttccaagtagctggggctacaggtgcacgccgccatgcccagctaatttttgtatttttagtagagatgggatttcaccatgttggccaggatggtctcgatctcttgacctcgtgatctgctctccttggctcctcaaagtgctgggattacaggcatgagccactgcacctggccagttttattaatttttaaagtgtggacttttagtttatgactactggcattgtcattattattattgttgttgttgttgttgttgttgttttcagcctgcagataactcttatctgacccctagctgatttgaattatatatcagactaggaaagcaatggggaaatcttcatctaaatctttacctactttagataagtgacctcagcacagtttcttggccatcaaaggactatgagttagcaacttgtattatgtcataccccagtgggacaagaggcttccttgttgtccttttctttcagccttggtgataatttacaaagatgaacacttgagcaccctagatgcttatagacccaagctagtacatgcaaaatgttattatgtctacactgacaggtggatattaaattggtaaagtgt

SEQ ID NO: 58001 - DNA, 1693 bp, Homo Sapiens; identical to SEQ ID NO: 26666

SEQ ID NO: 58002 - DNA, 1105 bp, Homo Sapiens
tggttggagctaaaatatgaaccttttttctcagtggtgtccagttgatagaaaagagagcttacttgctgtgggtgtatctgagtgtctggatgacataatggaaaacatttcttgctttagaactagaccgcagtttgaatgccatttctggcactttctggcttgtgattctgtttccttgtatataaagtaggagtaataatgcctatcttggaaagtgattttgggatttaaatgagatgtcctctgttttttcccagatcttataatagacactcaggtgcgagctattgtacctttattggttactaatgaattgttacatgctcttaatttctgcattcgtgaaagcactggacaagatcttgcagccacttcagaatatttagtctgttttttaggtctttactcggaaatcatgtttatgaaacttgaacatcagctttgatatcttgatcatacatttatataccatgtatgcttaagtttataaaatacacaaatcaaaattaaccaaaatattaataatgaaatatttccatatttttggtaataatgataaaatacataaatcaaaattaaccaaaatgttaataatgaaatatttccatgtttttggtagtaatgtttctttatggttgttggcataacaggctatggatgtctctagcatcaaagcaatgttaataagtctaataagactactggctatcatctatcaacattggtctgatttgtgataattgtgttcataaaacttcttaatatatttcctggcctctctgaactattggctttttcattcttctgcatgtgcgagagatggaaaccctttgaattagggctttgtgactgacccattgtcactacttccttctttttatgtattttctcctcaaagcacaaagaaattagaaatatccttgtctgggtaccgtggctcacgcctgtaatctcaacattttgggaggctgaggcaaaaggatcacttgagcctaggaggtcaaggctgcagtgagccaagtttgcaccactgcactgcagcttgggtgacagagtgagaccctgtctcaaaaaaaaaaaaaaaaaaaaaaaaaaaaaa

SEQ ID NO: 58003 - DNA, 928 bp, Homo Sapiens
gggggaggaggagggatcacttgagttgagctctgctgactagattgcatttctgtgggaagagatggatggagcatgaggaaggccatgtgtgtgtctgggacataacaagccaatgcacgcatactggagcatagtgaaagagtctattttgaagcttcaaacttagtgctgctgcagaccaggaacaagagagaaagagtggatttcagcctgcacggatggtcttgaaacacaaatggtttttggtctaggcgttttacactgagattctccactgccaccctttctactcaagcaaaatcttcgtgaaaagatctgctgcaaggaactgatagcttatggttctccattgtgatgaaagcacatggtacagttttccaaagaaattagaccattttcttcgtgagaaagaaatcgacgtgctgttttcatagggtatttctcacttctctgtgaaaggaagaaagaacacgcctgagcccaagagccctcaggagccctccagagcctgtgggaagtctccatggtgaagtataggctgaggctacctgtgaacagtacgcagtgaatgttatctgatgcacaaaggaaaataataatacaaaacccataacctattcattgtattgttgcggtagatcgagctacatgctgcacagcaaaagaccttctttgcacttctttcaagcagaattattgctgtatattcactctgaactgagagatcattgcaaaaaaaaaaaagaagaagaagaagagaagaaaagaaaaaagaaataggttaagcaaattttgtggtggtgcttatgtgtgcacagacatgcatgaggcctccgcatcttccaaacttggaaagcatattttaacagcacaaatatatctacatgtttgatccaaaaaaaaaaaaaaaaaaaaaaaaaaaaaa

SEQ ID NO: 58004 - DNA, 2517 bp, Homo Sapiens
cacttgtcttcagaaaataaaagatttgttccacccgggtgtgtggacatggatgcgctcatcctgtgttctcagacagatttcagtcattagatgatgtttttaagtcctgagtggattaaagccagacttctgttggctccgttgcgacctctaagggagagagaaatctgggctccctggaatcacgtcccctgcaagagagtcccttggtccattctcgggccagaaaaaaatctccccatcactccagtgcgagtggttggccttgctctggtccggcactgtgtgcgtcgggaagtcggcctggagttggggttgcagggacgccacggctggtggcgagcgcagcaggagtgcctggagagctcgcggccagcggggagctgagcgcaaaggcggaggagggaagcagcctctgaggcttccccgcctgggagaagagtttttggaagtaggcgagacggggaaggagttctgagcctcagtccgcacagcctcctttccgtccctttccgggtgcaatctccgggccagcgggtgcgtgtcccgctgcagatccgctggctcagggatgaggcgcagggcaggttctgggttacgtccccacaccgcggggaacccaggtgcgagcggggcgcagctggcctgccaacatcctttcttagctttgcatccttcgctccaaatgctggctctgcccttggaaactcgctggttgccagcagcattcttcagagtccgccgggcttccttcaggcgtttggaggaacacgcctttgatctttgggtctgggcaggctgcgcgggcccaccctccttccagttcaccgaaagattaaccacctccaaggactatttaagagcccctctcagggccgaacggggagaaagggtgggaaaaggaggagagagcatccctttagaatgccccagagtgacgagaacagacttctcaaaaaacagtgtcaggcggtcttttgtacccagcactcagtgtagtgcctgacacctcaataaatgttgaatcatgaatgaatcattaactctttgaggctacaagatagataagatagagagtaatggggcaaagtgacaatgggctgttgtggttaaattgaacttgaacttgaacctcttaccttgaagtctgggcgcacatttgagaaaagaataaagcaagtaggtatgatgggactgggtgaaatcaggtggtggtggattgtttgcagcactcacgaaatatgctctctccttttccagtaaaatatattactagatgttaatttacatggcccgtagactagaatcattagtttaaaatgtgctttgataatgaaaatggtttgagacactaagcagattacatgaccttattttaaaattaatccagttggtgatgaggaagtaatgtattgcttttcacagatgtaggtgagacactggtatagtggaaagagcttttgactgagttcttggacaagatactagacctttcaggaccttggttcttccatctctttaaaatgagtataataatgactacttttgtgagataatgtgtaattggacaatgcctggaacataatagacactagttaatattgggttcaagcgattcttctgcctcagtctcccaagtagctgggattataggcatccactaccatgcccagctcatttttgtatttttagtagaaacgcggtttcaccatgttggccaggctggtctcgaactcctgacctcaggtgatccacccgctcggcctcccaaagtgctgggattacaggtttgagccactgcacctagtctttttttttttcttaacaatcatacttatcctccctaaaagaaaaactctccctttctgtacagtcacaacacttctgacaccaaatgtgtggagttttcccacatacaaatggattctccaattctctatggacaccaactgggtgtcctacaattcaattctgatgctaactccttgctaatttgctataacagctcacaaacacttatttacagttactagtttattataaaggatatcacaaaggacacagatgaactagtttattatttacagttactagtttattacaaagaatagcttattataaaggatattgcaacagatacagatgaatagccagatgaagaagtatatagagcaaggttttaaagggtcctgagcatgagatcttctgttcccatggaggcagagtgtcccaccctcccagtaagcggatgtgttcaccaacccaaaagcactctgagccttgttgtttaggggttttgtggagatcccattacatagtcatgattgattaaacaattggccataagggattgaactcaaatttccagccccttttccctccctggaggtgaagtggggctgaaaatgctgaccctctaatcacaaggctggttcctcaggcaaccagttgctataccttagctgtctatggaccatgcagtgattccagccaccagccatctcattagcatgc

SEQ ID NO: 58005 - DNA, 2069 bp, Homo Sapiens
ggagccacggctccgggcgctttgctgggggctaaaggggtttatccctttccttgaatcccagcaggctagaactaccccctcccagtcttcaggcttgccacgctctccacccgatccttccattgaaaggcagagaaggaaggatgtgcttgggaactttaagacccacgaacgacagcgcactgatggagcagcccagtgtctggggcaaagtcctcgaggttcattcattcaggaagcctctgaccagcctttaccatgcgctgagtgagaagctgaggataaggaaagagcaagacccccaagaaaccctgatgtctggctgaaagccgaagcatgacgcaactttgctatatttctctccaacaaggatttgtatattttcgctttctcctcaagtaacacctggacctgctcctttcccttcaaacgctgagggctcagtctccaagttcctttatgaaacagggtgtaccatcagagacgcaggtatttattgaaacctgctttgtgctgggcaatgtgccagatgttggggataaaatggagccttcagaaatgaagatgcaaagacaacaggggaaaccatatatgtttatggacagtcatgccaaagtatgattggaagacaaaaagatttttggccaattcactgctcactaacatctccatcaaaggaaaaaacacacattgtaaaataagaattcttcaaagacaacttgaagacatctgggaattctgaagcctgaaaattccatgagttcatagcagtgttcactaattccactgatctaaagacaaaaaggagagtcaactgcgtgcccaaactcatttctgatgatttcttccatcctaacttttctgcctctctgggggtggttatgcctgtgaaaaacattgaagctgtcaggaacagactcggctttcaagattggaatgtcaaagtagagtcttcttttcctcaaaccagaaggggcttggttgggtaagagtttccagatctaaatggagacaggactgggatataggagcttgtacggataaacaacacaaacaccttgggtaagtgatacaccaagagagatcaaaatagggtaggaacacgatcctaaagctatgtgagatacgaagccaagagaccctgtctacaggctgacatgtattgcaatcagaggccacctacactcaagaaaattctaaatgatgtaataggttgtggacactttcttgtaaaaatgatcgatatttttttcttatagggataaagcttaaaagcatgggatgtatctccattaggaaatatgaagtgagttggtatattacaggtaggttagactgagataattataaaactgggctgattttacatagagaagaacttgattcctaaaggtgttgaaggacaagatggggacagttattgaagtgttcaggtgctgtcctttgtagtctgtagcctattaaaataatacacaactgaacacagacccaaggaaaggggttctactcatcgctagaatgtaaactctaagaagataaggattttgtctgcttcatttattactgtattcccagctcctaaaagagtgtccagcacttagtatctgttggtaagtacctgttgaattaattaaccagtggtgagactttggaaagcagctagtccatctgtaagattgttttctcatctgtgagatgagtcagttagattagatgttttctaagcttattctagttttaaaattgtatatttctataagaaatgataaatgaaaaatgtccattcctttttcatctccatcacccatctcacatcttccttcagtgcctatgtgatctgtttgagtataaccaggtgtacaaaagtactaagtgatatgagatgacttcagtagtccagggactctttcttcccccactctgtaaagagttatttgcttaatttaatgtacattataaaaacagaaaaaaaaaaaaaaaaaaaaaaaaaaaaaaaaaaaaaaaaaaaaaaaaaaaaaaaaaaaaaaaaaaaaaaaaaaaaaaaaaaaaaaaaaaaaaaaaaaaaa

SEQ ID NO: 58006 - DNA, 1425 bp, Homo Sapiens
ggagtcgcgggccaggagccgacaggcgggggcggaggcccgccccctccggacgtcactccgcggcggccgccgccggtgtgaaccggttgatgaatggctaagcgccgagtcggagcatccccggggcgggggagggaaggggctgccgggagtgctccgggatgcaggaagcctgaagttaagaaggggtgggagcgagagagattccgatttatcgactggaaggaatcatgctgcaaaccacgtttctcataattaaaacggtccaggagtgcacacatgtcacatgaggagactcgaagtttgcctgaatcgtaaaatgcaatccttctagggctggaaccgcgtctcagtgtcgagcctgctttctactgccttaaccacggtcatctttgccagtggtttaccttggcacctgggccccgagtaccttcgtcatcaaataatatttatgtcgcaagaccgctgtacccggtgactcaacaccttgcatgccacggccttaggcttggtcaagatgaattcttgtccctgggggcgctttcaagcggggagaaacttaccttcgcaaaacttaaggctatagaagatggggagagtatcttttgatgcagacgaagccctatgctccctatattctttttttgatcacacctctctatactacgtacgcgtgcaactgcagttggctcaattgtggcatttcgaaatcacatgcatcctttgtactgctgctcacttgatatgttgtctcagataatgaaaggttaggaagtgcttaaagaaagcgtttttagaaattaagaatcctcggttttgtcaagcactgatgtaattctttgcgtcaaagctaaagctcttctttatgttcgttttcagtcctcttttactgacttcattatttaagcccctaagaagtaaagtcttatcgcaattctgtgccatacaagggcacctctgttatttataatctgaaaaccctttctcctcagctctggagaaggaccaaacaggacctttacctgctttttaagaactcagttttccactaacactgaagccttttgtttgttattttcaccgagtatgagattggagagggctttagggatcaaattttgtcctctttcagtgccctgcaacatcttaggatttattagaacttctatttagagactggttgtatagttattcaactttcttaactctgtaagtaaaataagaactttaaaaaaacaaaaacaaacaaaatcctgggccagactttcaaaggaacaaaaactcttcgtcatttggaagaaaatggctcacctacgacacattttaatccattaaaatcaaggaaaactagcacacttgagaaatatgtccctttacaaataaatgatttaaaaaagtaaaaaaaaaaaaaaaaaaaaaaaa

SEQ ID NO: 58007 - DNA, 1254 bp, Homo Sapiens
gggatttgttcaaagaaaaatcggaggcaggataaccgcaggacagaatttttacatggaagggttaaccagatggtaaattacattacataattgttcaggctgtttccaattcttaaggtttatgattaaaataaaccaactcaaggcaaaaggtagaattagagttggaagggattatgatttatttcccttaattaatacagttttttcttgtctttcaaaataggcagatttagaggccctttatgtttgtactgaaaacaaacatacatcttttctcccttagtgtgaaatctgcctctccctaccttgtctactattactttccaccacctcttcatcttttgcgacctttccacttggtgcttgcctttggtgcactgacctgttccttttgccttttgtataccctcatgatcttccagccctctcctgagtattatctccatccctttgggactttttttctctcccaattctaagttgactgatgactaagaaatgccaggtgatcacgttttaatgtctaatataaacaatgatttaggaataaatccaggagtatttgttcatttgaaaacttcagagtacatcgagaaaactggatccatgtaaggttaggcttcattaaccaatggataatggataattcaccttgtgatcagtccagccctgggcaagtactatgtatttgattcatactatagcctggtatggatttgaggctatgaagagcaaagtaaaaacttcactggttaagacacaaggtttcaagcaatttcaatatgagtgtaagttttcctagattcatcattcaagagactaacttttgcaagacagtaccttagttggtgttcgataccagcaaagcagtggtatccactgtttcttctgattgatgaataggaatgctattataatagagaggcatataattatgggaaccacaactgaggcaatggagtccagtgaagaatcttcacttgggtgcagcctgttatctctgtaatctacctggaggtgacccatatctaggagaaaaaaaattataagcatttattacctaaaccagaattgttaaggattattttaatgacattgcaaatagagatcagcaacttggttttattgcttcccagttttttgaggctaaaaatgtgattaaaatctaatgttgatccaaagagctcttagtagagagcagagcgcttagggatgaatgctaaaaaaaaaaaaaaaaaaaaaaaaaaa

SEQ ID NO: 58008 - DNA, 900 bp, Homo Sapiens
acattttaaaattttcccaccatatgcttgtcattaatattttgaaaattactgtaattgaagaacagaacctcccccacttgccaaatatatatatatatatatatatatatatatatatatatatatatatatatatgtttttgccatctcagaggttccagtctttttctggcagtgttcccactgtggttgctagaaccataattaaatgcctgttattagtgtattttttccatagcatttacagcatcaaaagcaaagggtcttgtatggaactatagctatcaagggaacaatgaaaactaattacacactttgacatcaccatagtcaactatactcttgggaagacaacatgacagaggtggtgtgtgttgagggggtgggtatatgtatacacgatattccataagaatatgtacacctaaggtcagacatacctattggtttaccttcatcctctgttctctgaaggaaaaaaaatgtagaaaggactattaatttagttaattaaaatgaaaaaatgcagttctttgttaggaagggtctccctattttagcgttcttcctttgtaatatgaactgagagaaccagcaatatctgtgagtctgaatatctcgttattttgaatattattttggcatggtcttgttatcaatacatatattaacatatctgactattatcattacgtcttttgcaaattatttttttttacttagctctagatttttcattgacatctggttatttgagagctaatcacttcatttattatgtaaatctctctattgctatttttctcttttgatggcttttagccattttattgtctctgggcctgtagacctatggaagatttgagaaagaaaaggaaactaaaaaaaaaaaaaaaa

SEQ ID NO: 58009 - DNA, 433 bp, Homo Sapiens
aacagaaaaacactcatttagatacctggtttagtaagacatctgaacaacatgaaacccaactatgtaaaagctttaaaaatccaggttatgaattagcctaaacctgtgcttatgttccattctgtttagaggaagggggatggaatccctttcacctttatatttttcatgacaagtccatggtcacatcaaaaattacttttgtctttaacacagttgaaattattaaatgttatctagacctaaccaaatcctatttccttaatgttatattcaggacagtgaaaaaaatactgttttcttttagcaaagtctgacttttaaggctcagtttttacctgattaaataaactgcccctgcttttgaggttagaaaaattacttttgttcatggggtccattatactgtactattaagtttacttttata

SEQ ID NO: 58010 - DNA, 581 bp, Homo Sapiens
gccgactactactactactaaattggcggccgctcgacttttttttttttgtagatagggagtctaactgtgttctccaggctggcttcaaactcctgacctcaagtaatcctcccacctcagcctcccatagcactgggattacagccatcacctaccactccaagccatgagtttggctttggatttaagaaggttgaggtgttcatgagttgacaagtggaaaaaacaagaaagaagttgagtgtttaagactgctgtttgaaggagaagtctagcctcaagacaaaagttcaggactcatcagctgagaaatggcgctgaaaattatgcaaatggatgagctcagctagcaaacaagtccagagagagcagcactgggctatgcacctggcctaatgcttccctgctcctcccaatccctgtgttatgccggagagggttcagcctctggtgagcttcaccaaaccgccacatctctttcttctgagaccttctctaaaatcccctcttttatgcttagtgaaatgggattctctttttcccatccagcttaagcaaaaacttttgactatgagaag

SEQ ID NO: 58011 - DNA, 5207 bp, Homo Sapiens
cttcacattgctaaatccagggataaattttcagccctaatcttacttgaccatgagcagtagttgacatggtggattattccatcctctttgaaatactttgcttggtttctggaaccacacttttctggttttccttctatcacactgactgctcctttgtctcctttgctgatacttcctcatcaactggaaatcttggacagcccagggctaagctctatgatgtcttttacctacatttctttagtgatttcattcagcatcagatttttaaattccattcctttgccagtctttcctctaaattctagacccatgtatacaattgcctattcattatcactactaagatgtctaatggacttttcaaatgtaacctcccccaaaacttactcctcccatggtcttccctatctcaattaatagcttcttcgtctttcagtcccgagacccttcagcccagatcattttccttgactgttctttctctcttatatttcacatgcaaatgctgttgtctttatcttcaaaatatattcagaatcgaagcccttctcacacatcctctgccaccattttggtctgagacatcttcatctcttccctggattggtgcaacagcctcccaccttgtctccttgcttctgtggttgttcccttaaagcctgtgctcaggttagctgctgcatgaccctgttaagatgtgagctagtgcccaccactcctttactcaaaaccatccagtgacttctttttttcctctgaatggaaaccaaagtcctacagtggcctacatgacctcctatggtctattcttccacacgtccttacctagattttctcttgctgctcttccctcgctcattctcaccctgccgtacttactcccttgctgttctttgagtgttccagacagattacacaatcacctcagggctttggcactttgcagttccttctgctaggaacacttttccctcatatattctccttggtatacgtgtgtacatgtatgcacacatacacatgcacacatttgttctgtgtctctcctttccctctgttttctagtgctcttttatgtatttccagtactatttttgtttattgtcattctcccataattagacgataaactccatgagggcagggtttgagaatgttttgtgaactgttgtattctcagtgcctggagcagtactcaacatgagcagtggccagatgaattttgaatgaacgtctgctgcatactctctgctagagaaatgcggagatggtgaagccagtctctgcctatgaacagctctcatggaaaccataaattgaaacctgtagcagtaacactgcatataagtaaaagggcaacttggttatatgcatgcacaaggtgcaggtagcataaagggaggcgtaattaacaccaacttcaggacatccacacctggaagaatttttaaatggtgcctaacgtttgaccaaatggattacagggaagagaagggtatgttcagcagatggtatatagtgtgtgaaggctttgaggtatgacacagcattatgtgtaaggcaactcacacccacatcttaaaggacatgggcaaggagtgactggtaacaaatccaagggtcatatctagtgtgtcacgccaatgggcttggacttaatcctttctttctcctcctcttcccccggtcactattcaacttgcctcagtaagtatttattgagtatattctatgtgccaggcattgtgaggagcaaaaatagacaagggccttggctttgtggggcttaaagtctattgaaaggcagtcttgaatcaaataattaatgggtgccatcattgaatgttaagccagctcctgaagcatcaaagacatgactagagtccaaaatggaaacctcagagtttaagagtaggttattacaggggacctggaagatacagggctagtgtatatttctgtatttttaaccagataaatgcagtgcttctcttctccacattcctttcctcctcccatcctaacaatgcaactacaatagatcaggagtcccaaatccccgggtcacagatcagtactggtccatggcctgctaggggccacacagcagacggtgagtggcaggggagtgtgcaaagcttcatctgtatttacagtcactcctcatcactcacacattattgcctgagctcagcctcttgtcagatcagcagcggcattagattctcataggagcacaaactctactgtgaactctgcatgcgagggatctaggttacatgctccttaggacagtctaatgcctggtgttctttcactgtctcccatcaaccccataaaggaccatctagttgcaggaaaacaagctcagggatcccactgattctacattatggtgagttgtataatcacttcattatatattccagtgtaataataatagaaagaaagtacacaataaatgtaatgtgcctgaatcatctcaaaaccatctccccactcctaccaaaccggtccacggaaaagttgtctttaatgaaactggtccctggtgccaaaaaggttggggactgctgcaatagatagtatttgttggtttcaggattcttttagatttcttactatagtactttctttctagacccacacctactactacaaccatttctaatttatattgacttttggcaggggaggcaagggtaggaaggaaagttttataggaggacaagtctttttagtaagtgatcaagcaggctgggcttggtggctcctgcctgtaatcccagcactttgggaggccgaggcgggtggataatgaggtcaagtgttcgagaccggcttcgccaacatggtgaaacctcgtctctactaaagataagaaaattagctgggcatgttggcgggtgcctgcagtcccagctactcgaaaagctgaggcaggagaattgcttgaacccgggaggcagacgttgcagtgagccgagatcgtgccactgccctccagcctgggaaacagagtgagactctgtctcaaaaaaaaaaaaaaaaaaaaaaaagtgatcaggcaaagaactgaaaggagagagaatgaggaaaacaaaaactattataagtttcaaggtatgaaaagactttataatcaaggtcttctaaccaaatattcctaattagatttttttaattttccatatctttaagaaatatttttcagtttgtgacaggaaatagaccctttagcttggaccaaggctactaggcactggccaagtataaaaggcatagctctactctgctccatttagcttgtttctttatccttggctctgtcatttatcacaatttggaattgtcaacatgagcctgaacactaaaaaaaattctgctaacaaaggcactgtgttttccatgcctgagtcaacccactgccctttcctaaatgccaaagatggggaaatgggatggaatttcctggattactacttgtacttaaacctgagtaagttttgaatttggaagacacattccagccagagagggtggattttggacccatgttcgagtgtatcagccacccagattggttttatttaagaaacagataaacaaaatatcttaaagtatctgttatttctagccagaagtaacttccatatggtttaattaatagacctgccttggctcatcttgacttacagagctggggttctatattctagccctgttctccccagttaacagtcctcagaggaagaaacgagtccacaaggcagaatttaaaagctgtgtacaaatttaacatttttacccatggcaagacatctagagtaactgaattattgactgtctttgcttttggcaaggcaagacagcaatagaggatggaaattcaacaaaagtatcaggtgtgtatgtacatatgacattctaaaaggggaaaatgaattattccttaatcatctattaaataagctaagtttattttttaaaaacgtttaagcccaagaggagaaaatatgaaaggaaatgttagttatgcgaaaggttctaggtagtcaagaattcctttttcttttctgaaacccacttaaattcatttgcagcagccctagggggttgtcagaatcacattctggttaagtagtgtcagtgtgtcagatcaaagaagaaataaatcatcctcctcctcctcctgttgtgtgcaataaagtagcccattcaaaactggattcacagtaaccaactgtgtcatgtaaacaaagcaatcttcagattcaccttgtaggatggtgacaggtaaattaacaaggaagttgagaacaagaaggaaagctacctgggataaattcacggttttttttttttgtttttttgttttgttttgtttccttcagtgactttcaaaacgtcagcaatcagccctgaagtgtttggaatgcatactgaattgctacagggataaatataccattgccagaatcttctgtaggacagtcttactagaaatcagtaatcctgaggctgagcacagtggctgtcacctgtaatcccagcactttgggaggctgaggcaggcagatcacttgaggccaggagtttgagaccagcctggccaacatggtgatacctgtttctactaaaagtacaaaaattagctgggcacaatggtgggcacctgtaatcccagctactcaggaggctgaggcaggagaagcgcctgaacccaggaggcggagattgcagtaagccaagatcacaccattgcattctagcctgggtgacagagcaagactctatcttaaaaaaaaaaaaaaaaaaaaaaattgagcaaataaaaagttgtttatctcatggaaaccacgaggaaaatacacaagaaaaagtatagtaggctgggtgcagcagttcacacctgtaatcccagccctttaggaggctaagggaggaggactgcttgagttcagaagtttcagaccagcctgggcaacataatgaggccctgtttctactaaaaaaaaaaaaaaaaaaaaattagctaggtgtggtggcatgcacctgtagtcccagctacttgggaggctgagccagggggatcacttgagcctgggaggttgaggctgcagtgagctatgattactacacccttgcactccagcctgggtgacagtgagatgctgtccaaaaaaaaaaaaaaaaaa

SEQ ID NO: 58012 - DNA, 957 bp, Homo Sapiens; identical to SEQ ID NO: 24431

SEQ ID NO: 58013 - DNA, 2930 bp, Homo Sapiens
ggtcctcgaggataatgagggtgggggggaaatgcccgggcccctgcagaaagcgaggcctgagggggatcagaaaaaccggtgtcggggttctcgcagggatgtggggccagactactgggctctcccgtgcaggctgcgatgcagggatggaggaaggaggagcaggtggctggccccgaggggtcgtgtacggggaggctggatgccgggacgggggggatccactccagactcgcgccaagccaatggaaagcctcctatccaatatcccccaggtagtcgcgctgcccacacctgtcccgagggccgggtggctcctcacccaaacttctaccttcccttgggttgccaggagcaacagcttcatcttgggggagccgagtgcgtggcgaccctccctgaaactagatcgtatccctctctctgggggtgggggaggcagtattcaccctgggcgcgcgtccactccccggatgttttctgtgcaatcgaggctctttccttccactgataccccgagttctcttttttggtctctagcaaaatccacttcctgttgtgactcaacacccccaaggggcaaggggtggatgcctgagtcgcaggggagcgggagcaaaagacgaaaaggttggggctgtaggcctcaactcagagggtatcaggaatagggaattggtcctgagctctggcttgctctgcaaaacatcatatcaaccccacttccaacctatagagtatgagaacccgggtttctgagcatcaagtagacgagcatcagaaagagatcatcagagagatgatccgtctcctggatcagggtttaaacatcccagagaaaggggaagttgctgacttgtgggaggcccctgatttccgtcatgtggttcagggagtgggacagatggaccgaaggagactgctaacttggcacaatttccctcacccccatgaaattctgggccacaggaaatggagcgaatagcaggaagtgtgaaaggacatctgcttcagctacccctgctcccactgggcacctccctggtcatccccacactctgcctccttggccagcctagtatatgcacgctgctcctccccagcctggcaggaggtggctgggttaggatccaaagggcaagtgccttgcagctgctccagggcaattgccccagaaccacactccagttggcccactgattgtggctgtcacagccctgtgccagggctcctaatgggaggacaccctgggacaaagaggaaaaccagaagcaaaggggagggagagcctggatgatgccacggcactcagctcccaagttgggatgaaagatagggtgtttattctagcggctaccatatcgatgtgtattctcttttattggttaggaatacctggggccctccataccctttgccttacaacctttggacagcttggctttctgggaagaaggggcaagtgaagttgtagcagaaactgggcctatggtagaaaccatgtagggccaaaggccagggtcattgctctcctatatgctccagctgtcagagctggagaccagatggaaagatggttaggtcttacccagacactgtggtaacctgcccattggggtcctctgggaatggggtggtagacttggaagagggatgggctagttggcaggatttcacgtttctgctatctatctgaggatcctttccagggatcactgctgaggcagagtggattggaaggagtaaggtggtgcttcaaagaacaggcccacaattggccagatcactggggttgccaaacacttccttaccctcccagcaatgggtggagtccaggcttaaattgtttcagcaactggaaagcaaataaccttcaattcaacaaactatttatgccaactgcagagacagatagtgtaatattgatcgagaggatggactcggagccagactgccttggtttctattaattcccaccatttactccctctgtgaccttgaaacacttgacctctctctgcctcagtttcctcacctgtaaaacagagatattaggagctccatcactgggtggttttatttaatttaattaattaattaattaatttattttttgagacaaagtcttgctctgtcacccaggctggagtgcagtggctcaatctcagctcactgcaacctaaggccgggcacggtggctcacgcctgtaatcccagcactttgggaggctgaggcgggtggatcacctgaggtcagaagttggagatcagcctggctaacatggggaaacctcgtctctactaaaaaaatacaaaatacaggccagacacagtgactcaagcctgtaatcccagccttctgggaggctgaggcgggcggatcactagaggtcaggagtttgagatcagcctggccaacatggggaaaccccatctatactaaaaatataaaaattagcggccgggcgtggtggctcacgcctgtaatcccagcactttgggaggctgagacaggtggatcacgaggtcgggagattgagaccatcctgactaacacagtgaaaccccatctctactaaaaataccaaaattcgccgggcgtggtggtgggtgcctgtagtcccagctactcgggaggctgaggcaggagaatggcgtgaacccgggaggcagaggtcgcagtgagccgagatcgcaccactgcactccagcctgggcgacagagtgagactccgtttcaaaaaaaaaattagccaggcatgatggcaggcacctctaatcccagctactcaggaagctgaggcatgagaatcgcttgaacccaggaggtggaggttgcagtgagctgacagcgtgccactctactccagccttggtgatagagtgagactccatctccaaaaaaaaaaaaaaaaaaaaaaaaaaaa

SEQ ID NO: 58014 - DNA, 828 bp, Homo Sapiens
gaaccaggtgtttgtctatcttttctgggcttgcctacagtgagccttgtgacacccaggtgatcatactcttcttcctatgccctgctttcaggagaggattataacatctctggttgagaactctgtgatgtgactctccttgctggtgcatgctgtcagggaagattgtgacataaccctggctcagcacacagttgatgtgactcttgtgcttgttctctacccacaggtggaattgtgacatataacttggccaagcacacagatgtaatggtgtggtgactctcatacctagaactgggacctgtgcaggattgttaattcattactggacattcctgtgggtgtgattgttacatatgcctatgttcagcacccgagtgatttgattttgctgcctggtctcagtccaaatgtaagattgtgatttatcgctgaatccagcacctcggtgatttgactctcccttttttgtgggagggatcctgcaaatttgggtattgtcaattattgctgaatcctgtacccatgttatgactctcccaaatgtgccttacctgttgtggcccaatatatcacatttagaccatggttcaactatgtgggggttcaacacctgggtgactggtgttacctttttttctgggcctgctacggggacctgtgacattaacttcatgccacatcctggtatgtgactcctcttctccggcgatctctgctccgggaatggggcttcctggctagttcagggaggggccccccttcggccggtctggggttgggccttgggcacccgggggtctccagcccagggaggagccc

SEQ ID NO: 58015 - DNA, 2336 bp, Homo Sapiens
agcggaaattgctccttgaattttcagtacctaattaaaggtatggtagtttctctttaatactgtgatgccttgtttgtgagtttggataactcagtggcctttataactccagtcattcattaaagatgctattttgaaagcattgtctgggagtttatattgacttttcttgcaaatggacatccccaacctcctcacagtgagaactaatgaatataattttcacccatttcttctccacccgtttcttcttaacctacaatgcagttaaatccagtggttaaagaatctgttgagcatttcgtgtatgtaattccctaatagtggctctagatgtaatggtttgcattaatctatttaacttagttttatgtaatgaattaaactaaaactcactctatctgtctgtctctctctctctctctctgtgtacatgtctttatttatttatttatttatttatttatttatttattttagacggagtctcgctctgtcgcccaggctggaatgcagtggcacaatcttggctcactgcaacctccgcctcccgggttcaagtgattctcctgcctcagcctcctgagtagctgggactacaggggcacatcactatgcccagctatgttttatattcttaatagagatggggtttcactcttctggccgggctggtcttgaactcccgaccttgcgatccacccaccttggcctcccaaagtcctgggattacagacatgagccaccacacctggctgtttctttttataaaaaatacaagcatatatatttagggttatgtggaataatatgcctttgccagtttagtgcttttgaacatacatcagtcatggcatttaggcatgatttgaattttacattttgagtcaaatgaaatctgggaagcctattatatgccaggtacttatcctgggaattatatttaagtcaccccacttcattctcacaacaacatctaaagaaactaatagcttttcattataatattcgtgcatgccattctgcttggaaggaaacatattgaaagagggaaatttaagcagagtaggtgatacctgcttcctcctcaaggaataaagaattctgccatcaaataaatgaaaagggtatttcaagaataagaaaccagttgtacaaaggcatactggcatgactagtgtgtttggagaattttaagcattagttaatgatatttgcccaacaaacattaagttactggagtgctgtttttcctgggctggcataatacaagcctccagcccactgattacagtggggttataaggctatcaaaattttaaacagagtggatggtagtatgctgtttttacttcatcttggtacatgagtacgatatagttaaggctttgtgcctgttcaccagatggcacgtgagtacatgtgcacatgttatagaagttatctacattttcagtgaactgcttttgtggaaagctccaaattctcatcatgaatttactcctatatgagaacagaatatcaatgcttcttgactacagtctcccctactgatacttaatgtgccaagttaaaatacttacatagtggacaataaggcagcatggggatttcctattcctgtttcctgccaaattgacaggttgcattgcagcaggtgcacctcaaagtgattaagaatgtaagggctgacaaaacatgcgtgatgtgactgcaggcattttatgtgagtgacatgtcatggcaagtattggcctcaagagattatacttggggctctagggtgtgagggcaatctatacgtgtgtaaaagcatcattgagaaggtgagtactcaagaaaaaataaccttgactgggagtctttacataaatgaagtacattgcaattcaaggtatattttttttgctacttaaatattttacaaatgtcctatttttatgagtagatgaaatacacatgtgtcttgaacagtgtgattatttgactgctgaacaactcattaagctgccaggacagtgagagtctgctttgttaaaattcatgatagatgctcacaccgctaatcctagcactttgggagggtgaggaagaaggatcccttgagccaaggaggttgagaccagcctggcaatatagtgagaccctatctttacaaaaacaaaaaaattagctggacgtggtggcatgcacccatagtcccagctatttgggggctgaggtgggaggattgtttgagcccaggaggtcaaggctgaagtgagctgtgattgcagcactgcactccagcctgggtgacaaaatgagaccctgtctcaaaaaaaaaaaaaaaa

SEQ ID NO: 58016 - DNA, 577 bp, Homo Sapiens
  misc_feature (469)..(469): n is a, c, g, or t
  misc_feature (501)..(501): n is a, c, g, or t
  misc_feature (507)..(507): n is a, c, g, or t
aggaaagaaagaaagaaagaaacccttttcttagatccttagaagactcgactggagcccaaaataaatcccctgaattggccaagtattaaaggactctattctccttccctgcctttagtgtgctggagccctaacaagggcaaagaactgccagtggtcaagagctcaaacacccggaacaacccagcgacattcacagacaccagcaactacagccctgacccgagttggccctcagttcaactcttctgacggtcctcctgattttgcagataaagatgtggattcaggccaggccctgtggtcatacctgtaatcccagcactttgggaggctgaggtggccagatcacgagatcaagagatcgagaccatcctggccaacatggcgaaaccccatctctactaaaaatacaaaaattagctggacatgatggtgtgtgcctgtggtcccagctactcgggangctgaggtaggagaatcacttgaacccaggangcggangttgcagtgagctgagattctgccactgcactccagctggtgacagatgagactctgtctcaaaaaaaaa

SEQ ID NO: 58017 - DNA, 803 bp, Homo Sapiens
ctcgaactccagacctcgtgatctgcccgccttggcctcccaaagtgctgcgtgagccaccgcacccagccgacaaacctttattaccaggtgatatcaaatattattagagctgactgtggtagtgacagtttttcatataaatgaaattgcatcctcccaaaggaatcctgagtatgtatgcactttaaaagaacccagaatcatctaaatattgtcacatggctcttgcaagtgatgataatagtgatgcttataataatgaggattagctgcactcatcagcctgtagaaagtaaaaagtttccttttcgaaatttcctttcttgttaaagaataaatcataagtgttagaaataatagtttcttttaaagactaacttccttcaagcctcctctgctctgtgctaatgactcttcattaagccctatcctatgtagctgttagatataagggaataagtatattctatgtccttgtactttaaccaagatatttgtgctggacatgctcacaggcacgttccagcttgcagcctatgccccttccttatttggaaatattattacttttctaagtctttttgcaagcaacttcttcttttcctttgttctctattgcctttccctatataggaaagttttaagttattagccagtcgggtttaatttacaattgtgaggtccagctccagccaatggagacaggacacaagctgcataagggattaaaactgcttccctcctttgttcgggtgtgctgtcaccattgtttcatctgtgaggagcacctttctgcgaaa

SEQ ID NO: 58018 - DNA, 2933 bp, Homo Sapiens
ctcaggccttctcttgaacctctcaaattttgcttaaaagcacagtcctagtaaactcgcctcattggacgaacaagaattgcagaggtgtgattgttttgaagctggataataatgagtacatgaggtctcatgctattctgtttgctttgtttctatttggaatttttcatattaaaaaattaaagcccatttagttctaatagttaagtgactgccacatttcttgttttttagaaaattgatctgtttaatttcaaattttaattgttaaaataacaaactttgcagtaacagagtctcttttcggcagccatgaagaactgtactcaagtcgcccttatggagcccttgattcaggcttcaatagtgtggacagtggtgataagagatggtcagggaatgaagtaagtgttttttatgttccgtgtgttataacacctgattaagagaaaacagaatgatgaaaatgaaaagcgtcttaactggattcagtttctcactacataaaatacagaaaagtcaaggtggaggcaagattcccaccctctccagcagaattggcattctgcgtccttaccggctttctgtcacgtggatttccgcctgtttcctcattgcctcatggaaatagtttcatatcatagaaaggcaaacaggagctgagccagttgaaactgaagcctacaatctgaggtggggggtaatctcgagcagaggtgctagatggtgagaaaacaagtaggactttcggctgatgggtagagacaaggaccttagtaaagagtattcatgtgctcaagaggaataacttcctggctaattctgtcgtttttctcgtttttaaattattgatattatgttttctgctcttaaaaattactgtgtccacagaggtctacagaagaaaaaaagtaaaaaaataaataaaaattactaatgtgtaatattttagctatgcattaagttattaagtaaacttttgttagcaagactgataacctactatttataacattgttttactgtgaattgaaaccaaattaattttagaccacatcccatttgaaatttggaattacttgtgtttgtatgtcttggtgggtgggttcataaatgtggctgtatcaatacagatatatatgtagatattttaaatctatatatatataatttatggagtcatgaatcttttatattttttgagacagagtcttgctctttcacccaggctggagtgcagtggcacgaccatggctcaagcagtcctcccacctaaacctcctgagtagctgggactacaggcttatgccaccatgcctggctaattaaaaaaaatttttttttagagacatgctctccctatattgcccaggctagtctcaaactcctgggcttgtcattcccatcttggtctcccaaagtgttgggattataggcatcagccaccactccagaccagatttttatttttttgaaataggatctcgctttgtcgcacaggctggagtgcagtggtggaatcctatctcattgcagcctcgaactcctgggctgaagcgatcgtctcgcctcaacatcccaagtattaggattacaggcatgtgtgagcacatctagctaatttactcctggcctcaagtgatcctcctgctttggtctcccaaagcgcatggattacaggcatgatctgccaggctctaaaatgattgtttttaatgtttctgcttcttttttaagcctacagatgaattttcagatctgcctcttcgagtagcagagattactaaagaacaaagactacgaagagaaagccagtaccaagagaaccgcggcagtttggtagtaacaaacggcggaggtaaacataattccggtgacagctaaagtgtttgcaaccatttaactttttaaagttgtctttttcatacccactccttttgttggtgtatctatagcttcttcactcttcttttaaagacttcttttcatatatgattgaaaaatactattttccattgggatgaaactatgatttctggtttcagtcagagttaaaatacactatttctcccttgtttttatcttgggaggaaactttattagagacagtacacctggagcagatctttgttaatctggatttaatcacgaccttttgaagtaacattctccctttttaagattcttgctgtggtcattatttgatctcttttaggaatttagtcctttttttttttttttcagtgtttaccttttcttcacctggaattgtcagatgctcttcaaagtcatctgaatcacagttttccttattctgacattaaaaaatttgtagttcattagcaagcagcactctctctacttgcttatacttccgaagcagactcttgattttcgcattcaattctgtattgcttgaattggtttgaatttaatgtttaatgtttaatttcatatttaaattttgagggccagttataatggaaaataactttgattttccagaaacctattgcttatccgaggagagctttcatttctcagtgacgatttcaattaaatggtttgctgtccttttccttaccatcttagattctttactcctgtcgttaccatttcatttacatttcagtagttgtcttttaagtgtttctctcatatgaggtatctttctccatcagtttatttaagacttaaaataatgttgagatctgtgccggtatgatagccactagccacatgtgataattattgagtatttgaaatgtgtttttttaggctgggcgtggtggctcacgcctgtaatcccaacactttgggaggttgaggcgggtggatcacttgaggtcaagagtttgagaccagcctggccaacatggtgaaaccccatctctactaaaaaccaaaaaaaaaaaaaaaaagggcggccg

SEQ ID NO: 58019 - DNA, 2872 bp, Homo Sapiens; identical to SEQ ID NO: 24426

SEQ ID NO: 58020 - DNA, 2626 bp, Homo Sapiens
tgataagctaaggtttccttttgtttgtatttattctgcttaggatatactgagctttgtggatctgtaagttcatattttttcatcatatttgggaaattgtttgccattattatttcacttttgcgggggctctgttttcttacctgcgttctgagactaaatacacatattttggactactttttattgtcttacaatcactaacacgcttccagtctatttcatcttttttttccttactgttatttagactggataatttctgttaatctatcttctacttccctgtttttttgtttttttgtttttttcctgccatatccacgttctgctgttaaatctacctgatttttcatttcatatcctccttttggttctttttttttttttttttgaagttttatagtttctgttcctcatcttggatttccatatgttcgtgcattgtgaccatgtttcctgaaagtcctgaacatattcataataactactttaaaattcttgtttgcataggtcacataaggattgatttctgttaactgctttttctcttgatacaggtctcagaaatattccagtatatacaataaatcgcatagtcatcctgccttcacttgacaggagccaaacttccagcctgtcctacctgcctgcacatcaggattcctgtgtgcccctggatgcagccctacatgttgttttgtatttttgttccctcttgggtctacaaagttacttatcttgtttttgagtctttttgatgttaatctgtttataaggtatctattttaggtaggttagcctgagggagtacattgaaacacgaatttagtgcccctcctgtcaaaaggtctctgttttttccgaagcagaatgctttggaaacttgaggagtctttttatttgctgataatttggttaatatgcttgaactcagtgaaaacctcatttcagaaataaatatttataagtacttcactcaagtaattctatttatatattccctctccattccaaatgtttaaaagaggggttaatttaacttcaacacagtggaaaaaaataaatttataagaactaaattgtaataatattagagataaaagtaaacgtgtctgttgttaaataagaaattaattacaaattcatttagggtctttactataagtgaaaaactatatgtgtatagcaaaaagttattaataagtatgcatgtgtatgtgtatatatgtatacctagatactttttatatatgttatttttagtctttgtgtttgtttataactatgcctacctacattgatttttcaggagcattatacaaattaaaataactgtcaatattaatgaaaatctgtttagtatttttctaaaaaaattaactcatgtttgtgtatttatttatttattcatttatttatttttgaggcggagtctcactctgtcgcccaggctggagtgcagtggcaggatcttggctcactgcaagctccgcctcccaggttcatgccattctcctgcctcagcctcccgagtagctgagactacaggtgcccgccaccacgcccagctaattttttgtattttttttagtagagacagggtttcaccatgttagccaggatggtctcgatctcctgacctggtgatctgcccgcctcggcctcccaaagtgctgggattacaggtgtgagccaccgcgcctggcctgtgtatttatttttgaaagataaaagcttgtaaagctattaatttgcctgtaagtataactttggctgtgttcatggacaaagttttggggaattggagagataatgattgatatttgttaagaattattcccttttattaggtgattttcacccataatttaatccccatgacaaccttgatttcttcttccctattctggatttgaagaaacaggtagtacatttttcccaaagtgatacaatatggaagtaccagaaatggaatttaaacttagtgctgtctgattccaaacatgtttttctttagttcttgttagaaacttcctgagtgttctcattgtcattattttctgaatatttttagagttttgattttcttttggacccgaaagttatttatttagtaagactttttattctttgtttatttgcttttaatatttatcttttaattatatttaaaaaatcaggggattgggggtggttctttttcagtaggcaagagtttttaaatgtgtttattgttgatctttaaatttattatattgtacttatagaatgtgttgtcttaatttccatgtgtttaaaatttcttaacattttcttttttttggtatataattatttttaaatgttattgttttaatatgtctctagattaaataggtctcatactttctctaaatttctctctcatatatactgttcatggtctttgtatataaaatataccttatcaatttggcttttgaagtcatatcattactattaacttacttccaaagtatgtttaattctgaagtgtgggtaatattgaagtcttggcaaactcatgtgattagaaacccccctggtgcaacagagtgtgtttttggattcaaaaaaaaaaaaaaaaaaaaaaaaaaaaaaa

SEQ ID NO: 58021 - DNA, 2418 bp, Homo Sapiens
ggtccacggccggaatggcagcaagctcagagataatcattcaggtcttcgtgagctaaggccaaacaaacaaaaaacacttgctttgatggactgaatactgttattagaagtaaatatggaaaatgaaccagaccatgaaaatgtggaacagagcctctgtgccaagacgagcgaagaagagctgaataagtctttcattctagaagcttcactttcaaaattctcttacatagatatggacaaggaactggagttcaaaaatgatctgattgatgacaaggagtttgatattcctcaagttgatactcctccaacactggaaagcatactaaatgagactgatgatgaagatgagtcttttattcttgaggatcctacattgttaaacattgatactattgattctcactcctatgatacttcatctgtggcaagctcagatagtggtgacaggaccaacttaaaaaggaagaagaaattacctgattctttttcacttcatggatcagttatgcgccattcacttttgaagggaatttctgcccagatagtgtctgcagctgacaaagtagatgctggcttgcctacagcaattgtaagtatactttaactttttaaaggtaagttttctatttgattgggttttcttagatttatcattacattgttcaaaatactacataagttgttatggtaataaattcacaagtcattttactgccagtaatcaggtttaacatttatccatgttgaatgctttcttttttcctaattttttgttactttttaggcttttgtttgagaagcagataatggagtaatattagccttctccaggtttatttgtttgtagtactaccctgcccaagtaaatttgcttcttctgtgatttggctccccttccacaaggaatggaaagcatcatttgataggatcactttgtggaaaatagtacatttaacagctctggattccattgtcaggcttgccaaatagaactctgttgcagtattgtagagaactaggggatattgaaagcacgctggtactctctcttcttgtcttcctccagtgcctttttagcattccttttagtcagtctttggtaaggaagtgggtgagttttgaacactttggatggctttaggcccctgcggataaactagagaagtgtgttctcatctcttccccatgcctcgtaggaagctctaggttgggtagcataagtgcctcttactttgcctggatccctgattttttatttgaaagttgctttagaggaagctaagtggcatgttattgcctataatgttgaacatatgatattttgatagtgttactcctagagtaaatttagagggattctcagaaataaaatgtcctgagtttcatttcccgttttgcctcctggatgaaattcttcttatttacaatagtttgtatgtcatctggtgcctagaggaaggcaggccaacaaattcaactctgattatttcaagattcttaatgtaatgtcttaaaacgtaatcttcccttttgttttcaggcagtatccagtctgatagcagtgggtacatctcatggattggctttaatatttggtaaatttttaagtgctttcctgcttttaaatattaagtgtccttttgggttttataatgtcctttaatcacagtttatatagtgtacttgattttcttgaacaaaaccagaaaaacttgaaaagtagcagtcagtatttttatagctaaaaattatttgcctcacagctttgttttgctgcttattgcaagtttattttcttcttcatgaatttataagctatcatatctattgatctctctgcaaacctagacaaaaagaataaagttgaagggaaccttgggttatcatcttgtctgcctccggttgttggtggtggggatttttgattctgaatcaccttccagtaatgggtattctaaaagatcttcaggaaaacaggctttctcagtaattttcaggagctctcactgacaataagcttttttaaaaaatttccattgtaaatcactctaaaccgaattttttttggcctgtaatcacattgctttcttggttgaaagagaactagttttatttgtatagtagaagatagttgtattttctcatttttttctacatgagactaaatgactatagtttcattaaaccttctttgcttttgaattcaatgtatgagtagaatattttgttctttttaaatttaaaaactgttagatttttgtggccgggcatggtggctcacgcctgtaatcctagcactttgggaggccgaggcaggtggatcacctgagttgaggagtttgagaccagcctggccaacatggtgaaaccccgtctctaccaaaaaaaaaaaaaaaaaaaaaaaaaaaa

SEQ ID NO: 58022 - DNA, 449 bp, Homo Sapiens
  misc_feature (1)..(1): n is a, c, g, or t
  misc_feature (344)..(344): n is a, c, g, or t
  misc_feature (350)..(350): n is a, c, g, or t
  misc_feature (412)..(412): n is a, c, g, or t
  misc_feature (433)..(433): n is a, c, g, or t
  misc_feature (439)..(439): n is a, c, g, or t
ncggaattaacatttgtaactgctaatattgagtatatgtatgtgtttacttaacaagtaaactctttacttgcactatatcatttaattcttaaaaccaccctatgaaattggttcagtaatatattcccattttacagatgagggaactgaagcatcaaactgaaccgcgacttgtccaaagtcacatagtaagtggaggtggaactgggctttaaatccaagcctacatacagactagagttcacacttttaggcttggcataaactgcctataaactattaaaaaagtaaaactccataaaatctcaggtacttgggacttaccttcagtctgagaggtngggggntgggggagacagcaattttttatgtttatttaaaggctggaattttaaaggcaaaaacaagnttcccttttccttttttttantttaantttgtatttt

SEQ ID NO: 58023 - DNA, 966 bp, Homo Sapiens
gagcctccagctgaggtcgcaaccacacgttgggggttgagggctgcctcacgcttgcctctctggcctgggcagcctgctcactcacatggtacacatcttgtttcccctgtgttttcccagcaatattcagatgtgctggagattactgtaggaagggttggtgagagccagacttttaccatcttaaccatggctatttctggtgagtgtcccttaagatctcagaggataagtagtggtcctggggtgggcagggcaaagccccagagaggagcaggtgaagttcctctggtcttgggtgcaaaccatggggccatattccattcagtgcaataatatggatttatttcctgttctgtcattttcccatctgtaaaatgagggaaaagacctgtttacaagattattttaaggcttaataaaaatgctctgtactttataaaaattttgtacaaacgttgttaaattgactatctttttaaaagttgaaggagataagaatgagagcaaaagttgatgaaacagcaaacacaacaaagaacaacaaagtcaaggttgctgctttgaaaagacaaaattggtaaacctctgatgtgattgagaaagaaaagcacaaataatcaaagtccaggaatgaaaattgggaaatcacaacagattccatggcttatttagaagtatattttttaacttcccaacatgggaatttcctagctatatttttgttattggtgttacaaaacatggtccatgtgactgctgtcctttgaattgtgttgagatttgctttatgccccagcatgtgttttaccctttattggagattttgtgggcacttgaaaagaatgcatgtttctgcagatgcccgcatgcagttcttctacataaagccctttaaattgtaaaacgttggttcatatccttctccgcctcttaaaggaagttttattttggctccattaa

SEQ ID NO: 58024 - DNA, 1653 bp, Homo Sapiens
agcggagtaatagtgttttaagaatatttcagcgtagtagaggatttaagcagatcgctttgcctactttaattatatgaaataccaggaggtcagatgtttaacctctttcaacatatctgtttcttttcctgcagaaacagatgattatgctgagattatagatgaagaagatacttacaccatgccctcaagtaagtaaacttctgattttgttcttgctcagacttgacagatgcctcctggcatttaaaagttattgatacttactgtctttttagagccatttttaatacttccttggatgctgaacagaaatattcttttcaacctttaccattctatattacttacatatgcccactctaaggtcagaagcctaaaactcaaatatctgtaataatttttagttacaggatttttgtaatcttgttttctgactctatcataatagaacctttattgattagggtattttctgtctgtagaaaattagtattattggttaagtatatatgtgaatgtgtgtgtatatacacacacaatatatatatccatatatgtataatacacatacatacacacacgtatacccatactttcacacacatatattcaaaaatttgcattttccccctttaaattgtttattctttgttgccattgactaaccattacaaatagctcataaccatcgtcagtttgtacacctcagggatgggaggtgtggggagagaaacagaactcttaaaggaccttcatacagcctggaaatgtcaagattctgcttctctctgtgatgtgcagcttgttgattaaggaaaatcttgaagccccaggtctcatgttggagtgtatagtctccagatcttgaattagataaactcttgaaatttcatttgcaaaaagaaatttatttcttaatttcattttcttatttttttaatgttccagacagtactgacttgagtataaaaaaaaaaattaaacctgccttttaaagagtcttcagaagtcttagaaattaactcaaaatctgaatgtcctgatttcagtagagctatatatatttgtaaaataaatgttataggtgccttattctatagtataaatattcttgtaaatattcttgtttggattttctgtatacattgaggaagcattaccggaatgaagagaaacaacccagtgttgcctttcaagtgtgcattgtgccctgtgggcccatgtcccctttcaggagcttcttgactagagagttactcgaaagaggccagagctgaaacttgtgtgtacattttgattgccagtatcagtttggaaaaatgtttaaacttaggtttaactttttggcatggtggcgcacatctgtaatctcagcactttgggagacagaggcaggagaattgtttgagtctaagagtatgttacaaacctaggtgacataacaagatcctgtctctaccaaaaacaaaataaattaggcaggcgtggtagcatgcacctgttgtttcagctactcaggaggctgaggtgtgaggattgtttgagcctgtgaggtcgaggctgcagtgagccctgattgcacaactgcactttggcctgggcaacagagtgagaccctgtctcagaaaaacaaaaaaaaaaaaaaaa

SEQ ID NO: 58025 - DNA, 781 bp, Homo Sapiens
cacagtttcattctttttgaatgaagcagtgtcggtcgggtttatcgcttctcgatctttgaaaagctttatttgggttctgagaaaccactcttcctagttctgtcttggttcatggtttcacctttcccagatcctttgctggtatctgttcctcactaccataactaaatacagtcatgcatcgatggtgataccttctgagaaataccttgttagccaatttcagcattttgcaaatatcttctagtgtacttacacaaacgtagatgtatgggctactatacacctaggctacaattgtatagtagactgtacacctaagctatagtaggctatacatctaggtttgtgtaagtacactaaatggtgtttgcataatgatgaaaatgcatttgttgcttctaggctaccaacctgcatagcatgtcactgtactgaatactgtaggcaattgtaacacaatgctaagtattcgtgtatgtaaacatagacaaggtaatgtcttgtgcttgaatgtcgtgacaactacaacgctcgctccagacaaataggaatttttcagctctgctaccagatcaccattgtatatgtgattcatctgtcgatgatccaggactgtatcggtatcgctgggttacctccataaaagcctcttcaactctgcatgtcttctacatactcacctataactgatgattcacaaatgctaatctctggcctaagaccctctcccaagaaaaccagattctcacagcacacaaaccaccctgcactaatc

SEQ ID NO: 58026 - DNA, 2318 bp, Homo Sapiens
ggaaggcagaacttgataccctggagagggaaggactgaagcccagtttattcaggtcccagaatatccacactcaggaggatgtgtgttgggggtgaatttgggatccctagagttccagatttagccactgtctcagtgtgtggaagtcaatttgtgtgctttgggatgtattgtttctatgtctgttaacttaaacacacaagttcagggaagcgtccatgacagctataaatatcttttactctggtgtcccttggtgttgctttttcaatgacaagtgagatttgttttacacttgatataacccagcagctgtggctgccctgcatgccctctgggtgcccacaaggcacttcccctacagaagggaatctccaccggaggcaggcttggcatgccccaccttctgcattttagcagaagggcctggcatgatgagaaaagggaaggagaaagggccatgggatcaccactcaccaggctcctcccacctccaggcaagtcatcctcacaacacccttcaaggtagacttctcccagatgaggaaattgggaacaagtgggcttatgggaaccagacagagatgtgattaggaaaaaggttttctactttggagaaggcctgcagggaacattagtagggtttaggaaatgccactcacaacatcagactctgggtccttgtagccccgtgttccatccttgctcagcccggtgagcagagcctgggaggagccccagggttccttccaggcatcagctgcaacaggtgagatgctggcactgagcatcctggtttcccttagtaacctactgtagatttgtcatgtgtgcattttgctaacctttttagaagctatttatatctctagcccacaccgcatcacacgggaatgctggtttcctcctctgcgttgggaaggtggatagcctttgttgactccaaagcctttgctgtgttcgctccaaagtctgaatgccctgtgttcccctccttgggactctgatgtgggtttgggttatgccagcttagactgtgggctggcaggcagggactttagggtgggggcagtccccaccagctctcgttggtctacaattatgcctcataatcgggcacataatctgtgccccatccccatcctggacctttgatctgtttggcttctccacttccatcatgattctcctgaggtttggtgacattcccacgctttgaacgacagcttccccgcaggtatctcaagcatgagtgttacaggtgtgctgagatgccaagctctcatctctgaggggccgggggagtgacagcctaagggggttgagcatgtattgtcagttgctgtgggtgctgtgatgtgaaaaaggtgggaagcattgctttaagcccctcggggtcagaggccccatggagaattgggcttttgcggttttgttgtgcagtttggggtttcaagagattagatctaatggtatgaaaacaaagccaacaaagtagctctccacgggggtgtccgtttccagaaagagcacatgtgttggcagctgtgggtgctacagaggcctcagacacaacagcaatgcttcagcaggagagggacgcagttacaaagaaacaagatggaagaccatgtgtggctcttaaaaattaaaattcctgattctcagctgtatttcctttctctctgacaggcttggctttgccctaatttggcacacttgggtcagagagcagctttccttgccctcagcaatttgtcattcctcttttggtttctgagcacagctgctttgcatgtacggaggctgggctgtctgagctctcaggggtcccccggctccctgggtagaacgctctcctgcccagtgccggccaggacctcctggatgcgttcttgctctcttcaagaacagtgtctttctctaccatgttgcagtgctcagcccagtgcctgctaccttgtaggcatgcaacaaatacatcttaaggggattcatggccaggcagggtggcatgttcttgtctgtaatctcagtactttgggaggccaaggctggaggatcatttgaggtcaggagttcaagacgagcctggacaacacaacaagacccccaattctactaaatttttttttttaattagccagatgtggtaatgcatgcctctgtagtcccagctactcaggaggctgaggtgggaggatcacttgagtgcaggaattcaaagctgcagtgagctataatacaaggcttcattgcactccagcctaggcattagagcgagaccgtgtttatttaaaaaaaaaaaaaaaaaa

SEQ ID NO: 58027 - DNA, 1106 bp, Homo Sapiens
ggcacgaggcgctgtgggggcagtggctgtggagagcagcgctgcctgcctcctggcttcatctgcaagtttccctcgctgcagaagtcaggcatgcctactgatggagctcctacttctgccccaagccctgggcttcctctttctgagttgctcatggggttcagtcagggctccgcgtgctgcctgtactcaggtggcatttcccgtcccccgggctgagttgtagcatgcaattgcatacttgcccaagcattacaggagctgtggctgcaggacagggagggccacatggacatgacagaccactcaggtggccggctgctcctgggagtagcaggagggccccagcaggaagtgcttttcaagtggtgagcttggtggctgtggccgagacatgcaccttcccgtcattgttcctcccagtgtcattcttcctctgagaagctgtgaacttgaggctttgcccctggggtttgaggctcccatgaggtcccctcagaggaaggtgccttcactgggcagagcctggtggacctgcaccagccccatgaggctgagcggagagtgcagggtggggcccgcctgagggtaagcacagcagcacccctcagggctgcgctttccagagctgagagggagggcagagctggggtcttggggtggaggtggggtggggatgcaggtgccgcctcttgtactgacttgcaccagaggcagtttggctcccagctgcctgggaacacgtgcggagtttgtcagaagcaggaagacttggtgtggcgggaaccaaatcacagacacacactctcccagcaaagccctgtttgattcacccgtgtgtcctcagcagacacgactgtgtgttgggggttggggggtgggcgaggtgactcagccgcggacggcattagaatgcttagcacattgaaggcagactgtctgtttctgggtgccatctgtggcatgtttgggtttggaaggacagcttgcttgctgatgaacacttccacagtcttttgagctaagtagtttttgtaattactgtctagaccattctgcattaaaaaaaaaaaaaaaacccgaaaaaaaaaaaaaaaaaaaaa

SEQ ID NO: 58028 - DNA, 2455 bp, Homo Sapiens
aagaagtataatgcctaatgcctaatttttgtcacctggaaataattccagcttcactaacatttatcatatgactgaataatcccagtgccttcacatgtccttatgtcagcaagacacttgtccttataagccactaaaggaaaagaggaaatgtttccatgagggtggggctcctcatttactcacctgagcacagctggtaccttgtgctgtttacaggtaaccagtaaatggaggtatagattatgcgatctggctttaagaaaaccaacccttacaaagtaggtaactgcaaagaaaacatggattggagataatactaatgatacaagcacatgccacaaaagtaaatggtcagccaaccctttccatacccttaggcaagacacctaaccagccacatcacacccccaaaaacatatcttgatcagatgggacaagttgcagccaagtgaatgaggaagaacctggttttcaacagaaactggtaccgtagagaaagtgctttgaaaacaaatgtttggaaaatatttctattgtttagtgtttttgttgctaaaaatgatgtaactaggtcatctacaaaagctctcatatctgcagacttttaaaatccggaaacagaactgtaaagattcatttgaaaaaaaacatgaacatttcagtggattttgaacccatttgttaaaaatataaaaatgcaacacttgattagtttgcatgaaaaactgattgacatcagggaagatggaaatttacaagctgaatttcaacaaaatcctttgcataattggaggatggggttgaaaaattagtatcatgatttagccagcacagtgaatcgtgcttcctccgctgggatctgtttatcttgtgaggtgtatttttcagttatgccaggcattaaaaccaagtatcaaaataaactaaacctagaatccaacctttaaagttggatcatgaagtgttaaatcgagaattcttttttaaaaccagcatattcaatcatattgctctctaaagtaataaaaatattactttaattattaataaataaaattcttaatgtatcctattatagtcctatttgtataggttttataatatacatgaatattaacatagcggtacatgcatataaattaaaaattaggtaagatatattggggggcggcatgctaatttttttttctgcacaattaaaaaattttggagactctctaggagaaggtgagatggtacatcatggactctggttctgaagttgcctcttattcacagagattgctagaagtctggaggtagggtgggaacagggaccttcagtgactgccagcgggtgtggacccctccccacaccaagaagggatctttgcatgagaaattcacgggagtcaagaatcagccaatttcaggatctcctgggtcctcctgactgagcagcacacagtgctgagaggcattggggaggttcactcttcaaactgagatgcttgtctcctgcatgttaacggcagccatacctgaactcgtctcaataaatttttcatagcatcgtatcttcattaaaattttattctattagcattctgaatacaaaccactaagtatataattgctaaaacatgtgttaagcgacgacttacgaaatgctggttttatcatattgttaattaacagaaagtaggattaatacattcacagatcattaggagcatttggttcaatttcaccagctcttcagcagggtggggacagttgtcagtgggcagccctggggatctggagcaagaacacaagtgttcttcggggttcaccctcagcccctctacatgttctaagactgtgtctgggagaaactcacgagacagcgactcaaggtctctttttcctaaagaaaattgttctcagatgtcactcagtgtagcctactcaaaagaacctacatggaagggtttgggtggggaggaggagaaagcaacacactcttttaagacagatgagtgaaattccatggactgggaggatttgaatcttggatccgaggacatcgtagaaatcctggttgtttactagctgtgtgatgtggggcaagccatcaacctccctgatcctatgtccccacctataaagtaggaataaagatgctgacttcagctgggtgcagtggctcacacctgtaatcccagaactttgggaagtggaggctggggaatcgcctgaggccaggagttcaagaccagcctggccaacatggtgaaaccccatctctactaaaaatacaaaaattagccagtcgtggtggcacacgcctgtagttccagctacttgggaggctgaggcaggagaatcgcttgaacctgggaggtggaggttgcagtgagcagagatcgtgccactgcactccagcctgggtgacaaagcgagactgtgtctcaaaaaaaaaaaaaaa

SEQ ID NO: 58029 - DNA, 482 bp, Homo Sapiens
tttttttttttttttttccaactactattcaagaaattttatttaatcataaaactgaacaatgaggtgtttggtttggcaagaagatcagactaatgggtaaatgattaaggaaataatgaaagggtgcctaatgccttgggaagagcgagggctcaggaggcagaaggcttgggtgtgaatcctagctcttgcagttcttagaatgcctttggaaagtctgttcaaattctctgagctgctatttctttgtctgtgaaatataaattttaccccattatgtgagggtattgtgaggattaaacaagacaaggcttaggaaagcatagagaacatcatctactttcatagaattctcccaaaacagtaaacaaaaccaacactttcagaagaaagatgtattattcctgatataaaggagaaagtgtactgtctacaagcaaatcctttgccttccaagccatcagtttccctcgtgccga

SEQ ID NO: 58030 - DNA, 2404 bp, Homo Sapiens
gggccacccgttgcagctgcatctgtcccggccacacctgaagtatgaggtgactatagttgggggttggtctggaaccagggccgatgctgaccttagactgaagtttgggagcagtggcagcaagtctggggctctctctgaccctggtcagatgtacttagacctctgggttgtggaagttgcctggtggccctgccctgcctagcatggcttctcagcctggcatgcttgtccctcccacctgacagtggagctcgggcgggccgtgggcggccctgctcactctcagctgtcttggcgtcagctggagggttctcatttcactgttacttttgtttaggctgggaggtggttaaggtgctgctccttgggagtgggctggggggagcttctcctcagtcctccagcatagctccaggcctcctgcaggaagcccctttcttggtagtaaaggatagcttccagggaggaaggtggatgagaaggatcctaggagggctaggcgggatggcctgcttggggtggcgccctttcctggtcttcacccttctccccaggcctccctcctggctgggcgtgagccagaagtttcagtctgaaggcaggggtatcatgtggctgagatgagtttgacccccgcctgtgggcctggacgtgggcgtgagatgtgttcctgtctcccagagtcatggcctccagaaggagccatgtggaggcccagcacctggagcagttctgaatgcctggcttcttggaggccaaggttctaggcaaggtgggtatccaggctgggttggggcagtgcctctcagaattggggctggagttttctgctttctgcctcagcagggatcactttgatctgaaaacctcctctctcctggcctttgaaagatgctgactagagcacactctcctgccctttgctgggtgcttagaagaaaggccttgaggtaaccctgttccagcctccccacaggcccctgcagccacgtggactgaccagaggctccacacacgggcaggtgtggcctgacctcgctcgcgtaggatcatgggctagtgggtcccccaatggggggctgcttcgagtgtcaggaggcagcgaggggtgcacagtgccctggcctctgccatccccgttggttatttggctggtctgtgtttggtgagcgagtagagggatccagagtgcagggtggtcttggcctggggcttttgactgccctctggagatgcactgagggccacccagctggggagcagccgggagggataggaacctgttcccaccgtggcgtctttgcccttccaatctgcttcaccgtcgcccttgatctctgtgccagttggaaaattgaggcagaaccaatacccctgggtgatctggaaatcatcagtgggaagggttgcctttgcccaaggctaaagatgacatgtccctgcacactttcagccccaggttttcctaccttgtggggaggtgagaggtcagggtgagtgctgggtttgaggctcagctgtgctgtgtgaagattgagaggagcccacctgatcacatggacagaacgcacaggctcctgggtggccctgcggctccagtgacatagcacatggtcgggcatacaacagtgcccaggaaaggttagctggtggtgtttccagggtatcgtgctgagcttctgagatgagaatgtcctgtgaaagcctctgtctggaggtttcattggaagtaaagtttacatacaattaagggcctaaaattgtattttcatttaccttaacccagattcccagcaagctagagagctgccctcaccccaaagagttcctcatgccccgtcctggataggcctgtcagggccaggcagtgggcgcttgtccctcgccccatcctggacagtcctcacctgtcgctcacagcctgttctgctctggtttttaccctcagtccgttttgcctattctagaacttgatgtaaatggagtcatgcagtctgtactctcgcaaaagtcttcttccactcagtgccacgactgtgaggttcatccatgtctctgcatcatttctgccctttgtatttttagggttttaaaagtaatacttttggctgggcacggtggctcacacctgtaatcccagcactttgggaggctgaggcaggcggatcacaaggtcaggaggtcgagaccatcctggctaacacggtgaaaccccgtctctactaaaaatacaaaaaattagccgggcgtggtggcaggcggctgtggtcccagctactcgggagactgaggcaggagaatggcatgaacctgggaggcagagtttgcagtgagcccagatcgccatggcactccagcctgggggacagaatgagattccataaaaaaaaaaaaaaaa

SEQ ID NO: 58031 - DNA, 704 bp, Homo Sapiens
  misc_feature (588)..(588): n is a, c, g, or t
  misc_feature (656)..(656): n is a, c, g, or t
ccgatggctgtgcttttagtagctgttaggtaccaggaactgtgcttggcccttgacacatataatttcacggaatcctcacagcagattaaaaaaaaaaaaaggtaccatattgtccccattttacagaccaccccttacaagagatgagatgatgtgctgtgtgtcgcccagctcattagtggttgaactgagatatgaaagcagctctggctgactccaaaagccaaagctcttttgagggccagaggaagaggagagtcaggataccttttcctaggggctcttcatttgaagagaggatagtaccttgtcacagaaactgacatcagtaaatattccaaaaaaaaaaaaaaaaaatcttgattctgcggccgcaagcttattccctttagtgagggttaattttagcttggcactggccgtcgttttacaacgtcgtgactgggaaaaccctggcgttacccaacttaatcgccttgcagcacatccccctttcgccagctggcgtaatagcgaagaggcccgcaccgatcgcccttcccaacagttgcgcaacctgaatggcgaatgggacgcgccctgtancggcgcattaagcgcggcgggtgtggtggttacgcgcagcgtgaccgctacacttgccagcgccctancgcccgctcctttcgctttcttcccttcctttctcgccacgttcgccg

SEQ ID NO: 58032 - DNA, 2008 bp, Homo Sapiens
ggggcccagagtagccgtggataatctattttaaggtcagatgattagcaatcttaatgccatctgtagccttcattctcctttctccctttgctaattcacatattcacaggtttcacagataagcacacgtacatattgtgttgtgggggtattattctgcccccaggtcttatagccaaagcctccaatagagtgttgattaggaacttctggtatttattagtcgtcttctggacattcacgaaaataattttacaaatttatcattcttaaggtatttgtcatagataccttttggtagttatatattattatataagttttctacttctttttttttttttttttagtagagacaggttttccccatgttgcccaggctggtctggaactcttggcctcaagtgatccgcccacctcagcctcccaaagtgtgggattacaggcatgagtcaccacacctggccagaaagttttcttctattttttgttgttgagacagtgtctcactctgtcctccaggctggagtgcaatggcatgagcacagcccactggggcctcaacctcccgggtcaagcaatcctcccacctcagccttcctagtagctgggactgtaggtgtgcaccaccacgcctggctaatctttgtattttttgtagagatggggttttgccataggctgttttcttctattctatggttctcataatactactttgtaacaagccattctaagatttaaagtgatgcaaaaacaatgatttattattgtttctcttgtctctgtagggcttggttggtggttctgggcttgcttgggtggttctcacttggggcttgaccaggctggacatccaatatggcttctccactcatgtgtctggtgcttccgtgctcctccatatggcctctctctcccacagagtaacttgtagcatttattgagataatcacatttttcttcattaatctgttaatgttgacggaatttaacgcactggttgtttactagggtgtgccctttgttgaaaagaataggagggagtggagagggaagatgaagacatcatgctgtgatgggggcccaatagccctgactccatggggagctatggagctaggttgctcctacagtgggctaggtgtctatgcattcgcccagtcatgggatgtgggttgtccttggaagggtcaaccttgggtgaaactgaaatgattctctaaagggactgaaagctggatgaacgttgtacactgacagcactctcagcagttgaggcaacaagcctttccttgaaagaagatctgggctatgcctctccatgtctgccataaggttcatagtattattattattaagtcaataaattttcattcaagaaatttcatgttgaggttccttccactgtccatcaaggaactaaagttcctctaaagagttggagtcaaaagttatcttcaatagatttatcttcaaattagccctttttaatagaagtgatgcttaattcagttatcccgtcataccataattctttattttggcttctttcatctccttttaatatggatatattcacggaggcttcaaaattcacctatggaaaaaatcaataatctttgggatctaatttctacaaccaatttactttagggtaatttttagagtaggtggatcttcctggttctcaatttgacaccctctctaaacatgtgttcaatcatactcatttctaagctatcacactcaagaataatagtacagatctgtggaatatgccaatatctacagtaaaagatacattattaggtctttcataattttagcaactgtcttgtagttccttcccacagacctaactaatagtcctgtgagtaaagcaaaaccacagagttagtctatgaggagtttccaacaacatgcagctacaggaaaagccccattggaatagacctccaccaataataatattatctataatagcaaaaaaaaaaaaaaaaaa

SEQ ID NO: 58033 - DNA, 2005 bp, Homo Sapiens
attacaccagctctctcagtccggggaggaggaggagcaggaggaacgcgagggggaaggagaggaggagcggccagcagtagccacgaccgccaccaccaggcagaggaagagttcgtggggaggaaaagacctctcctcccccttggagcgccttctctctgcttttggagaaagggaatacgcgataaagaaggagacggaaagaagagaaaaagtgaggcgggagacagagggaaaagggcgtgaacagaaagggccggagcgtgcaggggagcacagggcgcgggggcggcactgccgagccgggagcgctgccgcttgggcaggtgccgcggccgctgcccggaggcggcatgtgacgcgcggccgcagctgcccgcgggcggagcgctctcagaccccggagcgcacaccgcggggccatcggtgccatcgcggatctccaggctcctcatcagtccgccggggccgcagcagcgcttctgggaagacgggcgatgaactgaagggcggctccgggcaggggggcacgatcttaaggacagtcgctccctgaacgcggagccggaggagacgaagggaaggtggagcggacgccacccgcgcaccgggcaggcgcggagaccggcgtgggacagccacctggagcgcagctgccagaaagaaggactttgctgctttgggccaggatctgaacttaggtgtaaaccattgccctggcagagggaacctacccagtccattgctgcctgctacaagatatgaacagtaatggcacatattttggttatgagtcactcagtggactgtggattgaatgaactgtatccatccccatcatgatgtacagaaccaagtctcttcactacacttgtgttctgattagtggccaaataaatgacagtcagaacttcagctaaggtacaataaggttttgctgtggcgtggcacctggtctctttctagaaggaaagttcaacatacagcacaattctggacacattgtattggtttgatgctcctacctggaacagatcctcacgagctagtaagtttgaaggggagtcataaagaggaacaggcattatacgcaaggctgaagaagcagttggtaactaacagtacatctttttctaaggccaacactaaacataagttgcagagctggcctgtggtggaactcacaagtcttattggcaatatatgtgaggagacaaaaagcaacatatggagaaatacaaaaatatactccctagagatactgcctcttcagatgtcaagaaaaacctggatgaaatgaagcaagagtggcacgctgcaaagttacaaattcaaggccacccacagaaccaaacattaacacttaggtggagctggtctcttgggcagcctgacatctggtccactcctctgtcctatgccgggatcatcatgaccgtagagattatgtcactgttttgcatccttgttacataactcagttcctggtagattccagtgaaaggcacatggtggtgatatttttgagaaagtagagaagaaaagaatgaatccggatggttgttgagacagaaactgagcgtcgaacctcattttctctcgtacccaaaccttgatgaaacaacagaggaaagtattgggctgcaattgtaggcgcacaaaagcaaaccttgagtcatggatgaccgaccaaggaagagtccccttgggaggaggaggtgccaaagaccagtgatactgctttgggttatgtgcactgagggtttccaaccctgacggatatggattctaatttaaaatatcacagggaagaaaaaaatagacgttcccatggcaacattttctcagggccagctcttctgtcttattatcatatcttatttaaatatttcctggaatcagtttaaatttaatccctctgtgtgtcttctattttcagtggccatggagagcgtaacatctggtcagaggttttccttaaataaatcatataattgtaggc

SEQ ID NO: 58034 - DNA, 1396 bp, Homo Sapiens
gagactcctaatatatgagaggaggccctcctatgtatttcaaatgtggagaggcatatacttctactcagattgaaagatttatcttggaaatccttttttggtttcctttctacataatatgacttcttatttcattccaacttaattccaaaaatatttatccagcacctactgtgaaccagtactgtgctaggccccaggtattacagtagttatcaagacagacatgacctctgcctctaaggagcttagagcctagcaggggaacaggaacttagacaaatttaagtgctgtcccgtagggtactttgaggtcaaatagtagaggcacttcacgtaacataggaggtcaaggaaggctttctacacatttcatttaaatgaagacctaaagggaagcaagaaaaggcagaagagaatgttactggcaaagggaaaagcatgtgctagaagcaagcagagatgagagattaagcttgatgcttttgagaaattaaaagaggttcaagttcgtaatggctacagctgtgagatcaactcttttaagtctcatgacagtacctgtaactaataatattatcccctccatttttatggttgtggcaaatgaggaaaagatgttaaatattttgccctaggtcatccatctctagtaagtggcacagccagggattgaacccaggtcatctggctgtagcatattggctcctaactaccatactggattgcctctcagctggggcatagtcttccttagtaaatggaatggtctgtgtctggtactacctaccataaaaagagctggagcttataggatctggattagtttagaaatacaggtttgctttagtcttttattcttgattgggaatgaaatgcttcatttgatatgcaactctgaggctattgacacatattttccaaaaaaccatagatgggaaattataactggttacatgtttattacaaaaataaaattggtgtgaaatatgtatttcctgcaaggctagggtttttgtttgattgttaaagttaacttggcaatatccttttctctgatttttaaagttaggctgagtgcagtggctcatgcctgtaatcccaaccctttgggcaaccaaggccggaggatcacttgagcccagaagtttaataccagcctggttaagatagtgagatgcttactctacaaaaataaaaaaataagttagctggatgcagtggtgagtttctaagtcctagttataggaggctggggcaggaggatcccctgagcccagaagttcaaggcagcagtgagctgtgattgtgccactgtactccagcctgggtgacaaagcaagaccccatctctcaacaaaaaaaattaaaaattaaaaaaaaaaaaaaaaaa

SEQ ID NO: 58035 - DNA, 1014 bp, Homo Sapiens
ggcacgagggtcccccagagcagagaaccctctctgtgtctggaccggggaggagcagacgctggacaggtttttggcagaatgctggcaattcccaggaagatatgtggagaacggaaaggttgctacacccaaatagtggcgcaaaggctatgattatggaggattggacctgcaaactccagaacagagcaaccttgtaaaatgtgtgtgggcagcacagagaccttgggcaagttaacagtttcctcatctgtaaatactgatttatggaaagcacctggtgtatgttctgccctctgaggaccctgccctttcccaaaaggggtatcttaagaaggaaaatatggttgctctttgccggacagcagagtcccagaaccccatgcaggtgtttcagggctttacgtcattcaaggatgtggctgtgaacttcactaggaagaatggagagtactggaccttgctcagagagtcttgtacagggatgtaatgctggagaactataggaacctggtctccttgggatttccattttccaaacctggtatcatctcctagttggaagaagtggtaggcccacgaacgcaaatgcaggagggagaggtgccaagaagcagctgtacactctgcaaatagcagagagaagcccctcactctcgatgctccctgggtacctccctatggccctgctgctgccgactgcttcaacacattcttctgtccctgctgtttagatgtcgtgttgtaggagcctgttgctcagcctcccgagtagctgggattacaggtgcctgccaccacacccagctaacgtctctactaaaaatacaaaaaattagccgggcgtggtggcgggcacctgtagtcccagctactcgggaggccgaggcaggagaatggtgtgaacccgggaggcggagcttgccgtcagccaagatagcgccactgcattcccgcagcgaaagagcgagactctgtctcaaaaaaaaaaaaaaaaaaaaaaaaaaaaaa

SEQ ID NO: 58036 - DNA, 390 bp, Homo Sapiens
gaaatttgttatcagatttaacttgtcagaaatgctaccataacaatattagactaactactgtaaggaaaaaaagaataaacacaaaacttcaaatctcagagacttacctgctcacatcaccttctaaaggtctctttcctgcagcgatacaggttccttggtctctttcctgcagtgatacaggttccttttctctaatgcctctgctgtcccctactacgggtccaatccagcccacagcttgtttcgtatggccccagaactaagaatgcttttcgcttttttaaagcgtaaaaaaaaaaaaaaaaaaaaaaggaaaaatatgtgtttgaagaattacgtgtcttgcaaatgtataatatttactatctctttacaaaaaaaaaa

SEQ ID NO: 58037 - DNA, 8407 bp, Homo Sapiens
ccagatgcgaaagccatggagttgagctgcagcgaagcacctctttacgggcagatgatgatctatgcgaagtttgacaaaaatgtgtatcttcctgaagatgctgagttttactttacttatgacggatctcatcagcgacatgtcatgattgcagagcgcatcgaggataacgttctccagtccagcgtcccaggccatgggcttcaggagacggtgacggtatctgtgtgcctctgctcggaaggttactctccggtgaccatgggctctggctcagtgacctacgtggacaacatggcttgcaggctggctcgtctgctggtgacgcaggccaatcgcctcacagcctgcagccaccagaccctgctgaccccatttgccttgacggcaggagcactgcctgccttggatgaggagctcgtgctggctctgacccatctggaattgcctctagagtggactgtgttgggaagttcttcacttgaagtatcttctcacagagaatctcttctacacctggctatgagatggggcctggctaaactttcccagttcttcttgtgtctcccggggggagtccaggccttggctttacccaacgaagagggtgccacaccattagacttagctttacgtgaaggacactccaagctggtggaagacgtcacaaattttcagggcagatggtccccaagcttctcccgagtgcagctcagtgaagaagcctccttgcattacattcactcatcggaaacgctgaccctgaccctgaaccacacagccgagcatttgttggaggcagatattaaactcttccggaaatacttttgggatagagcctttcttgtcaaggcctttgagccagaagccaggccagaggaaagaacagctatgccctccagcggtgcagaaactgaagaagagattaagaattcagtgtccagcagatcagcagctgaaaaggaagatataaagcgtgtcaaaagcctggtggttcaacacaatgaacatgaagaccagcacagcctagatttggatcgctccttcgatatcctaaaaaaatccaagccgccctcgacattgcttgctgcaggccggctttcagacatgctgaatggaggtgatgaagtctacgctaactgtatggtgattgatcaggttggtgatttggatatcagctatattaatatagagggaatcactgccactaccagccctgaatccagaggttgcactctgtggcctcagagcagcaaacacacccttcctacagaaaccagtcccagtgtgtacccacttagtgaaaatgtcgaagggacagcacacactgaagcccagcagtccttcatgtcaccatcaagttcgtgtgcttccaacttgaatctttcttttggttggcatggatttgaaaaggaacaaagtcatctaaagaaaagaagttctagccttgatgccttggacgccgacagtgaaggggaagggcattctgagccatcccacatctgttacactccagggtctcagagctcctcaagaactgggattcctagtggggatgaattggactcttttgagactaacactgaaccggattttaatatctccagggctgaatcccttcctctatcaagtaatctacagtcgaaggaatcactgctttctggagttcgctcacgttcttattcttgctcatcacccaaaatttctttaggaaaaactcgtttggtgcgtgaattaacagtatgcagttcaagtgaaggtaagcatcatttaacatttggctttgaaaacactctattccagaacagatttttcagttagtataagtacataaaatattcaagaacagcagacaagaattttccattctgttttcataactggtttttctaagcctgacaaaattcttttcttattggataacagccaaatttgattttgatcagatttgattttgatgaaattacaaatacatgcacacctctctgttactttattctttgaataaaatgttttcctcaaggatagtgtaaattagaattgattccagttatattattatgagggccttagaggattttatttgagtaaattataaaaattacttttgtctcatatatacattgctaacataatccaactcctcagagccagagtgttgcagaatggattttcttctttctttgtttagaaagggactttggagagttgaaataacatatttgtaacatgattaaatatatctcaacatttttttggtggcaatgtaggcaattagaaatataacttttaggcaataaacttaatttaaatgtaggatacatacaaaaaggagtgcaaatcataaatatgcatcttgaattttcaagtgaattcagatctataaatggaaaaattatgtacaacttagagctccccttgtatcctctctaagccactcctcccattttcacctgcccccattttgaaatgtaattatttcatactttctgtaattaatatgtaataattgtattaaaaagcatatttgaaagtattcatgccaatgcataatacatagcattataatgaaatttttgtcaatgtcttagagaatatctttattgtctattatccttaagggacttaaaagattcagaaagcaagagatgaacttaagtactctgaagtactactcaaatattttcttaagataaaatatttaaaataggatttattttattccctctcttttttcttattcttgcttattaaattgttattttgcatttttatgccatgcagaacaatactgaaaacataatcttggtgcttgaaacagctatcctagaataatgacatatatgctagatgttcaataaatatttgttgaatgagtatgagaaaaagatagataaaacacaaaagaaatgctaccatgatttttgttttcctttttctgggatgtactgttagaagagaagagagcaagactgataatacatgtcagtttttatttttggatggggagatgaagaaaagttacaagagaaagaaaggatacaactaccttgagagggcaggataaataagatggattgaatttgttctggatttttgttttttacttcatgggttctttctaggtctccaggtctccccagccttagtttaggttggtgtatttttaatagctcgacacctcttcactgatagtcccagctgatgaattaacctcacattgttactatttggaaaacatgtttaagttttctgtgcttcaaattatggctttgcctttagatctgtggtccttgatctatgaagtcagatatctctagagtttgaaattattgaccacacaattaagaggaaacttattgttcacaagggaaaatagccctaatttacttattctttaatgatcaaggaagggtgtctttaccttacatgcaagcctgaaacctttgcatatgagttagaataaaaagctgatctcaactgctttggttttcagtaaacgaaaccttatctttagacggtatatttaaagacaaggctacttgagtgaagtttgatactatccagaaggtaacagttagaaccaggcaatttaggttgagtctactcactaaatatatgaaaattccagtggatagacttatatggctgcaaacatttggattgataccatttaggtcagtcaataccataggactatgaaaaataaattaaccactaatgaagaaggaataattttatctgtgtttatgtaatcaaagcacaaatgtgaaagcttgcctaatgcaaagatatattctaatgtttcattgtttagtcggcttggattaatcaaaagtaaattgaggtttgtgttgccataaatcctttcttgatgagttttgaatagtcctaaaaattttcaggtctatttgaacagagtccaagtctccttatgtcccagagggaagctcccatatgagagctgtaatgcagatatacaaacctaggatgctttcggtcctttttattattatttgtgatgttctgtcttccttgtcacttccaaagagttacttactgtaatttctcatgcgtcttttttttttttttgagccaagagtacgatgatggcaactttatttttgatgtttgtatacataaaacaaaatccagttttataattccctttggtctattatagatttaggcagaaaggaacattgccaatattaaaatgataactacagtctcaccaagggggacaaaggggttcagcatttaagaatttgaggaatgacgtaaacatacttttgaaaacgttgtgagctgatggatggaatttaattggattttgaacagttggtggcttattctcttggtacttcagcctatttaccataagaatagtgagttctgcctatgacttaatttgaggaacacttgataatggctataaaataaaggcttcaaattcttcaaagtagatttcctattacatacaagatagtattaggtgcaacatttgatattacccatttcaggggatatgtatttgttttcctccttatgtatcatttccctttgcaacctagttatgcctcttcactgttctggattgtgagagtgaaggatttgtccctgccctgtagatggtgtgctccacagtgactgccccctccttcaggctctctcactgtctaaatcagtgtctctactccacccctgtagtaagtatttcaactctggaaacaagatggctccaagctgcttgcatgaacctcccttctggccccctccacaagtccaatgaaaaaaatggtcctccctttcccatgagccacagagcacatctctgaacttgctgctgctaggattttatgaggacattgcagctatatgaaaattaactcttcttatgctgtccttcaagacttcatttgagctttgtttaaaagcagttatttattggttctgtatgttagggcattagtgttatgaagaatagggatgactctagtgaaaagtatccaaaaagatagagctaattttctgcacttctgaaaatgtttgctgtcccttgctgatgctaacttagttcatgaagtcattaaatgttggcatattttggccatgtttctccctaccctctttaaattacagaaagtgatttaaaaaaatccagagcaatgccttacttatataaggtaactcattttctcattattttctagctggtagtgtgtataatgatacaatatggttgagtatgcatttcagactaacatatgactgccagtttgtgtgccttagttttcattttattgttctgtgtcttgtagagcaaagagcttacagcttatcggagccaccaagagaaaacaggtacttttaactattccaattttcctgaggaactgcatgatccttctttggaaatgtccacacatcatttttgctatctgttcactagttcatgagaggtttccatgtaacaagcctgcctaagaccctttgctccctctgggatctgtatcaggatagatctgccagccctcccctttcagtccttggctgtgcaggcctcaggattggggacagcatgttctgtctgggtatcttcaaagccaaataccctcaaggggagcagtgtgaggggaccacctgttttagaaagacaacatgttttctccagctctattccaccatgacaaggggacttactttagtaacagaaccctgggtggtcaatgatagaaagtgcctaaacatccctactgtctctctatggatttttgcctagtagcccttcagctggaaacaaagaataaacaatgcagaagacttttaagcatgatcagtttcctggttgagatgcagatttaacctaagcttctctttctcctagaaggtaaaactgttgttggagtatagcttgggaagcagaccagtgtgcaagcatgattgttggtttctgttggtgttgaataactaactgcccatgagtcacactgtgaaatagccccagggttgtatgcaaaacaagtgccagaatggcacacatgtttgactttaagagaccatctgaaaagagtgaaatggtttaattttgtttgagattaatactaaaactttgaaacgttttaaacgttttagtatacggatcaagatggggtgtttcgttttaaatcctggaatcaaagtattaataagaaaaagcctcctttggatcatttctattttttttttgaaaccagaatagaaactttcaaatgatacaaaagaggaagattaagaatgcccttgaaagataggatgatgatcaagttgacttcgtgacaatggcaatgaggatgatgatagcaaaagcagtaattactgacaaatattgaacatttgtatgtgccttgtactgttttaagcagtttacatttattatctcatttaagcaatttacttcctcattctggaatttgatcttcatcttggtcatcattttgattaacagtcatctttttaacaactggaaaaataatggattgttatcaagaattttttaaattaaaaatataaaaaatattcatttgtcattaggagagagatttaagaccgaaggagccaatgttatacttggctaaatagtagcctataaaatattttcactttgatggcatctttatgaagtttctttttatctggttcttcgttctctgtcactcttgtttttgttttctgttcctttctattctttaatctttcttggtccacatcctgaaagcatcttactctctcagtcatatgccttggtgtatctagtagagtggatctttcatctcacccactctattcctgctatcttatcttgttggatatgccaataagatcccaagccatacctaatgctttgctttggtcatgttacaggtatttacctgagatgatgccttctttgatattctcttatttgtattaatcacttagtttctagaaaaggggacatccatgtaaaaaatgagctcactctataccttgcaggctcatttcagcagacactctgttctaatttcttaaagattatatggcatgacttgattattttactgccaccatctgtcttaaatctattgtatgtatttcctccttctcctcctctttcttcaaatctgaggatctgagtgttaacagaagttccactgtgtcaattttcaatctgcatagcaggaacttctttcagccctttaggcccggtgcggtggctcatgcctgtaatcccagcattttgggaggcagaggcgggcggatcatctgaggtcaggagtttgagaccagcctagtcaacatgaggaaaccctgtttctactaaaatatacaaaaattagccaggtgtggtggcaggcgcctgcaatcacagctactcaggaggctgaggcagaagaatggcttgaacctggaacgcggaggttgcaatgagccgagatcgtgccacagcatcctagtctgggcgacagagccagactccatctcaaaaaaaaacaaaaacccaaaaacaacaacaacaacaaaaaaacactttagatgccaattctttaaatagattaagggttaaaatattaagaatccatattcttaatatgttttaaatgtctatttacctattgaaaaggcagtaccattaaaggctctgagaagggtttgtaaaactttattgtgagtgatgctatcggtcatcaaactaataatagagattagacgttcttgttctgggatgttaaaaataacttaatctttccagattcttacaaatgtaaaagctatttaaattctattatgaaattatttgaaggttttctcttctcaattattttctaaagtgcctgattttgatataggtaaatatcacataattaaattagatatgaaatgaagcaaccaaccttctacatttgcccagaggttatacagtattacccatcttcataatctgatagtggattatgactatgatattcacatttctaccaggttgggtgatggtttaagttttcatatttcataattaataatatttttaaaaaagcatttttatgtttacactgttatatctcaggtcttatcaacctcagcttaaaaagttgaagtatcggctgggcgtggtggctcacgtttttaatcccagcactttgggaggccgaggtgggtgaatcaccagaggtcaggagttccagaccagcctggccaacatggcaaaaccccatctctactaaaaatatgaaaatcagctgggcctggtggtgggcgcctgtaattccagctactcaggaggctgaggcaggtgaatcacttgaacctgggagcctgaggttgcagtgagccaagatcacgccattgcactccagcctaggcaacgagagcaaaactccatctc

SEQ ID NO: 58038 - DNA, 3008 bp, Homo Sapiens
gcttacatcgctactcagagaattacatggcaaaaatgggcccaaacccggggctcatgagtgcatgttctcagaacccctaggagggatttcaaaacccaagtcccacatgattctggatcattaactcaacaagcagcagacatgcctctttaaggcaaaagttctatgttccatcagtgagcttctcataccaccgtgtctcctatattcttcagtaaaagactttaatatctaaaactcctttaacctcaaatcctgttatccccaaatgaggcaataacttactcggtgagatgtgtgcatcctgctcagtttgtgaatgcttcattacatttatatggatggtatattttccaagagctagataaaatatttcctcttctcaagtagctgcctactcatttggaaagaaaagacgtgaaagatgaacaaacagccattaagtgcaatcattggtgccttaaaactttaaggaaaataaaaatcactggaagtcggggcagtcacgggaggcatccagagagctttctcactcacaagagggttaaggtctttactggcaggttaagtagccaggcaggaagatttgtcaaagaggaacccagagtccaggagaggcaataaggaaaggaaatatatccaggggcagtgaagtataacacaaataaataggttgaggcggatagcagaggagccgatgatccaaagagaaggcaacaaggaaagggtggggaaaggatatgaggggaaaaaaaacagggaggaaaaaactgaaaatgaatcacctaattaatgggtgggaatactggctgatggtttccaggggcattgtttctagtccagttatctgtcagaaatgctttggattcatggccaaaggaaatttaggagaaacctcccagataaaatacttgaatgctttccccaagcttctatttttacttgtcttacttcaaagactacgaaagacagtgttataccttttgaccaagaatataatttgaaagtcctgattccagaattctttggaattaacaaatatgtggtgtggtccttatcttattatgttgggaagcacctgacatctttggagccagagcataacttgataaataacagttgcatgagtggttaggagataactctgagaaggagctggggactttgcacagattcaaagaagagacagaagagggaaactgctgccttcacatcatttctcccttcctttgtatctggtttattcatgagaaattatgaatcaacctgaagaatctgagcagttatttgtagaccttaaagaacaaatttagtttcctttggtttattatgtttacatatttaatatattgattgaacaaagagtgaccgaatgcttaatattttttcaagcaacttctttgatatgatattgtcttattctttgtttcatcaagatgctatacaaattttcaggtagtagaagtttcagtaaatgatatatattgctgacatgtttagtcaagttatagccactacacacagtaaagtgagaagattatacatcctctctcaatggaggatgaataaactattagtagtttattgagtacattcctttttgtgtatacctgggatgtatacacacaaaaaaggaagaatgataggaaacatgtaaagtatattagaaataactatgttttattttgtgatcatggagaaatatgggttcactttaatattgaattgaaaaaataaaaatgtgattagaaatttttgtatttaatgagtcattagatatgattataaatttttcaaaaagcattatacagttctccaatgttatataccaggcagcactgtgagtgttctcaaaggcattgctcagtctccactcccttttttaatccaggaaaagtactaatgatttaatatttttctacaagaatatcccactttcagaggtttttattattttttaaagagaaagttggttacaaacagcatctaaaagaacattcctttaaaaaaaaaagccacaggaaaatcgagttatttttataatgataatactttatacagatctgtggtctttcatctaagaactttcaagcacttttgaaatgttgactcatcaatccgtgacacacttagcagattgggcagtaattctgcttccatttggtttcaaagaactcactgtgtcctaaggtatgcggatgctttttttaaaagaattattgttttgatttcttccctttttctttttttaaattttattttattttttatttcttgttaaaggccagaagaaatatggcttggtcccaacccactaggaactcagtgtgatgaaggcaggagccacagaaaagttcttccaattcccaataacacatgctacgacttaaaaaccagagacggaaatctctacatattttgaacagtccagaaaggcattcagaagatttgagccttaaattattccaagatacagaaggcagacttgctttgctgaattgacattttaatcagtatttccttatttattttttaacaaggcaactatattatttataatatcctgccaaacatgaatgcatgcctttcacctgtgtaaggggctcaaggatggattcttggctgaagaattcctctggaaatatttcccaggccaaaggtgggaaaataggctgccagtaattggaagttttatgaagtatgcattaagattttatttattaatagtctcaagatttagccttatctttccaattttctttgataggtaaaatcagtagcctttctgctaccctttagggtgttaaagcagtgagttgtgttgggggttatttttcaacccagggtccatgttttttcacccacatgatttttaattacttcacttccagttaaagaatggtatgaaagtactgtttatatgtcttgttaaaataaaaacttagacaaattaaatttaacagagtttaattgagcaagaaaaaaaaagaaaaaaaaaaaaaaaa

SEQ ID NO: 58039 - DNA, 2770 bp, Homo Sapiens
ctggctgagggcagcagggagagctagggtcaccttgggcttctgcaggtggttctggtgtgtttctctagggccactaggatgagaactgctagtccatctgaggacacacagctaagacaaagccacatctgggttggcagacgttacagcggcctaggggagaagggcgttcttgctgcctgtgcccaggaggggctggcctggagcagaagggcagagccttggggctgtggctgagggggcagtcaggcaggccagtgggtactccagccctgccagtcactggcaagcgtgtgagaggtactgcagcggtaccttcttgctgagctgcaaagtggccggagggaaaatgaggcatcttgtgagctctgtcccccttgggttggtggttcgctgcaacatgggccaggagaaagggtgcagggaccaaggtggggtgttgatgggttcagatggaatgggggcgctccggaggctgcacccgggctgtgggcgtgattaacgctgcttcctaagtgcccttgggagtcgccaggttttggatgcagcagctccatcagaagcggtttagtgccagctccatttgcaccagggccagggctggggcagtgctggctgagtttctctgtggactccccttctctgtgtccttgcctaggcctctgtttcctcctctgcaaaatgagggtggtgaagaaaccacccgtcaggttactgggggcactcggagctgatgcacgtgacgtgcaaatgacggtcactcagcacctggcgggaatcggggctcagcacctcgcactggtgctgaaactggtgtcatcagcgccgttctgggcatcacccctgtcccagcggtgccgagggacatggtacctcctgcaaatgatcagctttcacctccccctgcttgcctcagtttacccatacacctcttggtgtgttctcctgggatctttttgttctagactctcacagccaggaggacccggtacccgcctggaatcccagggaatgacggaggcagggtctgaacacgggcttcccacacagagcccgagtctcctttcagccgtccagggctttgtggaaccccagcgttcaaagtggctttggcactggtcaggcctccagggtcctgggtggccttggctcccaccccagcccctgtgcccaccagggggcagcagagattgcagttcccaggagcccatatatcagcctgtttattagtggaataaaagtcgttggcaacggcagggcttttcggggctgcataaatctgcgtctgtgcctcgtgaaacccatatgtgcttaattcatatgtaaagtttcaagcaggaagagaatacgtgtccattaaattctatttgacttgattataatcattagccgtgaataattgcttctcagtgcctaccacggagccaccacaataagccagaggagagagcaattatcttggggtggggatttttaaatttatatttttgaagccaggagcagtgctggcccgcgggcgtcagtggcccatggagaacgccgtgggtcacactgggctgggagcttgagatctggccgcccgccggagcttctggattttgttgtggggaacagttctctttgttcctgctgccatatgggaggggctgtcgctgcctgggcttgggtccagctgcagggatgtggaggggaaaggtgcagtgggagctaggagagggctgtgagggaaagggggcggggagagctcccaaccccccaccctcctccatcttgaaaagctgtggggttgaaggggtctccagccaggctgtgggcatctctcttgccactcagcagggccctggggatccttggagagggcagttgccaggtgtccccctgcccgcccccctcactctttcccctccctgaagaggcatctgcctgtgacctccgtcaggccattgagaatcggaccctgggcgggacgtagtagctcactcctgtaatcccagcaccgtgggaggccgagacgagaggatcacttgagctcgggagtttgagaccagcctggccaacatagtgagactctatctctacaaaaaaaaaaataatacggcatggtggtgtgtgcctataatcccagctactcaggaggctgaggcaggaggattgcttgaacctgggaggttgaggctgcagtgagccatggttgtgccactgcactccagcctgggtgacagagtgagaccctatctaaaatatatatatatataatagaacatcagattctgggccaggtacgatggctcacacctgtaatcccagaactttgggaggctgagacaggcggatcacttgaggtcaggagtttcgagactagcctggccaacatggcgaaatcccatctctactaaaaatacaaaaattagccaggcgtgatggcatgcacctgtaatcccagctacttgggaggctgaggtaggagaatcacttgaacccaggaggctgaggcaggaggattgcttgaacctgggaggtcaaggctgcagtgagccatgattgtgttactgccttccagcctgggcaacagagtgagactccatctcaaaaaaaaaaaaaagaaagaaagaaaatcagactctgaggctgcaggcggtggctcactcttgtaatcccagcactttgagaggctgaggcaggaagattgcttgagcccaggagtttgagaccaacttgagcaacacagtggcaccctatctctacctaaaaaaaaaaaaaaaaaaaa

SEQ ID NO: 58040 - DNA, 2677 bp, Homo Sapiens
tttttccctctgcatataccgttacctatgtgtgagcacatgttgttctgtaacttttttaacttaacagtgtagtcaactgataattcaataatggaagtaaaggtaaaaataaactaagcctacagagatttttacatctttgctatttaatatgtgatgaacctccatattcaggaattttatttacaaacaccttatctattctttgtccttcctctttagagtggatgtaactgaaattcagatagctttagtgattgtctttgtgttgtctgcatttggaggagcaacaatgtgggactatacggtaaatctgaatatttaaatttatatttaagtacttttcaaatatttaggaaaaagtattgcattgttaattttcttcaaaaatccttggcattgtatttaattttttttttttaattggtgtatttaatatttgttccatttcttaacatttttttcttcattttataatgtgtattatcctatataccttatggcatttcctcctatgcttgagtatattgccacatagaagaagacaacctcatttccctaatactaaataaaacaaaaacaacaacaaaaaacacacattggaataactttttccagggtgaaataaaataaatactttaaaaataaatccagtaaaatgttttacatttaaaacttgtcactcaatattaggaaagtagttaatttgcatttttataatctactttgaggtgaagattcccatattaaggaatgtttttattttctgcctgcttggtgacctcagtagtttcataaaagttggctcttaggaggccactgtcataaattcaagcttttttgcaaaagaagaacatttctgaagaaacagttgtcctgttaccacaacgtaagtccaccatactggctaactgactcacactttctgctcatagtgttaagaataataataataaggatatcaatagtcaacaactaacagtcattcaatacttatgttcctaaacattcaccatctgcccctcagttttatctgcccctcagaacaatcctataaaatagatattattagtattatgctttataaataagtcttagggtgattaagtaatttgcccaaggacacatgagaagtgctggagctaggaattaaacagactgattccagactgtatgtaatcactaagctatatatctagtaaaaatagtaagtgatacaaaactaaacatagttttgtggtaaacatgatcagcagtcacactccttgttatttacctaaatgatttgaaaacttatgtccacacaaaaacctgtacacaaatgtttacagcagctttattcataattgccaaaatttgaaagcaactaagatgtccttcatcttagctggataaactaatgctaaaaagaaatgagctatcaagccatgaaaagaagttatgcgaggaacttatggagttccaagaagttatggaggaaccttaaatgtttgttactaagagaaagaagccaatctgaaaagtctgcatattgtgtgattccaactatatgacatcctttaaaaaggcaaaattatggagacagtaaaaggatcagaagttaccatgggttggaggaagaagggatgaataggtgaagcacagagaatttttagggcagtaaaactattttgtatgatactaaatggtggctacatgtcattatacattcgtcatagcacacagaatgtgtaacaccaagattgaactctaatgtaaactatgaactttgggtgataatgacgtgtcaatgtaggttcaccagttgtaacaaacgtaccacgctggtgtaggatgttgttggcagagggaggggtggctatatacttttccactcaaattttgttgcaaacctaaaaccactctaaaaaaattaagtccattaaaaacacagtatgaggccaggagttcaagaccagcctgggtaacttagcaagaccttgcctctacaaaaattctgtaaaactttagccaggcatggtggcatgcacctgtagtcccagctactcaggaggctgaggcaggagggtcaactgaacccaggagttcaaggctgcaatgagccattatcatgccactgactacactcctgcctgagtgacacagcaagaccccatctttaaaaaaaaaaaaaaaaaagatttccctgtagcatttagtatcagaattgccaattatcatttgtcagtaggctccgaaatagactttgggcatgtttttaagtagtagtgatagattcttcaatacattcatattccctctcatcatgtaagagtaaatagaatcaaggatatgctactataggcccatacaagataacagagggatgctatgcgttttttgtagtaactgttcaggttgtgcccgtaagaaggtaaatgtacgggcagatcacctgaggtcaagagttaaagaccagcctggccaacatggcaaaaccctgtctctgctaaaaatacacaaattagccgggtgtggtgatgggcacctgtaatcccagctactcgggaggctgaggcaggagaatcacttgaacctgggaggcagaggttgcagtgagccaagattgggccactgcactccagccctgggcgacaagagactcgtctcaagaaaaaaaaaaaaaaaaaaaaaa

SEQ ID NO: 58041 - DNA, 350 bp, Homo Sapiens
ttttaatgtcccaagttctttataagtggagaaaggcagatggggctttaaaaatcacttggtgcagcagaacctgaggcccggcggccagcgaaggccccacggtgtgcccgatggtcaggggctgcagtggatggggacgtggaggctgcgtaggaggcaccctggaggctggacaccctggaggcctctgggcttgagctttgcacgcaggtcagatgttttttacagtcagcttcaaatggtgaaggggccctactcctaggtggtctggaatgttcccacagctgcctggtggtggcccccacccaggacccagcagggtacccgccacaggacgttcccgcact

SEQ ID NO: 58042 - DNA, 2094 bp, Homo Sapiens
agcggaagtggattctagaaatggaggtcattaaatgctcaatacttgcgaattgtaatgttgatctgcatttttctgtttagctttatttgtgaaatataatatgtagttcttaaagaaaaattccataagccttttttttctttcgtatgggcttaaaaatattttagaaacttgttaaaaactagttatagaaatattcattatcctactaaaagtggcaggaggaatatagttgtgatttaagatatagaaattgttttgtactaatgtgtttattgtcagcaattacattgttaaaatgtaacaagtaaattttgccaagagtacaacatgtatccatttgtaagtaagcacacagggaaaacaatattttaaatgttctacccattgaattatttttctagtaaacaacttgacataaaatagactgaaacatgcatttattttaacaactatgttaaattacagattaatggtccaaaataaaatttgaactgatttaatacataattcagttttgggggaaaatagatctttctccaactgagaatagactatatattttttcttttgtgaataacttattttacccttaataagtttaggacttgcctgaaccacagccagccttaagaatcctttgttcagaaatgttcagcgttatattgactaaggagcaatttgggggttgaaaaatagatcactatttcagtttctgactttagactatttttaaagtaaagtgctgagagttccaattgaaaaattgcaaatgctcaaggacactgtgcctggaaataagattcctgaagagtagagcctagggatgtttaggcaacccttacagaaacaagccttcaagtacattttaagtacagtgtgtctcgcacgttttgaatgattcttttcagatttttttttctttggatataactattctgttttactttacatacatatatatacatacacatatatgtgtatgtatatatgtgtacatgcatgtgtgtgtgtgtatatatacacacatatatattcacatacatattcatatatatattcatatatatataggtatatgtatatatgtggtaaatctaggagtttacatatccaagggaaaatttccctcaaacttgtgattgctactcaccagatcaaacattagcagtccctaagggacagtcccagtccacagccaacacacacagatcccttcttatcacttggaacagacactcctccatgggtacatacccagcattcttaagaaaacaggtatctgttgaggttaaactaatatttttggagcaaaaaatgagaattgtcagaagtttttttttttttttgagatggagtctcgctctgtcacccaggctggagtgcagtggcgctatctcggctcactgcaagctctgcctcccgggttcacgccattctcctgtttcagcctcccaggtagctggaactacaggtgcccaccaccgtgtctggctaattttttgtatttttggtagagacggggtttcaccatgttggccaggatcatctcgatctcctgacctcgtgatccaccgcctcggcctcccaaagtgctgggattacaggcgtgaaccaccgcgtccggccagaagatttttattaattgtgttttctagaaatgtaatcttagttcagctatatttaccagaaaaatatacaaagcatttttatatcttagtatttgtaactgaaattatacatttctgaagaaaatatcaaatctgagataaaaacagcatggtaaattaatttgtactgaaaatatttttgaaaatattttgtctataagaatagtttgacaagtagccttatttgctatagttgaaagactctgcttgaagaaaagcattcacacttagaccctggctagaagaaagaaattggaggcagattttttaaaagactgtactttcaggcctgggcacagtggctcacacctgtggtcccagcactttaagaggccaaggcaggaggatcactgaggctagaagttcgagataacctgggctacgtagtgagaccctgtctgtaccaaaaaaaaaaaaaaaa

SEQ ID NO: 58043 - DNA, 1341 bp, Homo Sapiens
gggcggagagggttatcatttaacatggaagaagatgagttcattggagaaaaaacattccaacgttattgtgcagaattcattaaacattcacaacagataggtgatagttgggaatggagaccatcaaaggtaagaatggaaatgtttgttttctgtctcaaaagaggattttttgttttgttttgttttggtttgttgacaggtaaaacctccataattgaaattaaggtatgaaaactggtttgatttagtaaaagtcttaaattgaagaatgtcttacaacagatgtccattttcttacttcaactatatatattgattattatcaggctaatgaagtattattttgaaaagtccttacgtaacctgcttaatttaatagataaaaattagcatattaattatctgaatgtaaacagatgtttctgtggtgcttcaaatcatcaatcctaagttaatattcttaggaaactactttcgtctggagagtaaaaagacaatcttgaaaccaaaccataaacaatcacaaattctgaaatattgaggactgtattaattgggaatttcctattaatataaacatatttcaaaatattttttcttttttgagatcatctcactctgtcccccacgctggagtgcagtgagccgagatcgcgtcattgcattccaacctgggcgacagagtgagactgtctcaaaaaaaaaaaaaaaaatctgtacccaaatttttttgtctttttgagatggattctagttctgttctggagtacagtggcgcaatctcggctcactgcaatctccacctcctgggttcaagcgattcttgtgcctcagcctcccgagtagctgggactataggcacacaccactgtacccggctaatttttgtatttttggtagagacggggtttcgccatgttggccaggctggtctcgaactcctcacctcagatgatccacccgccttggactcccaaagtgctgggattacaagcgtgagccaccgcacctggcctcccatctcaatttctaattcctacccttaaagactccttacaaatgccatctctttcatgaatccttccctgatcaccacatcatgtatcgtgaatgttacctattatcgtagctatctccatccctatctagagccatctttttaaaatggtgtgccttccttcagaccatgtttgagtacctgccgtggtcaaggcacagtactggttactgtgaaccagaacgtactgtgagttgatataaaatcttgtgtccaaaagttaattaaatggtaatgagggaatagccaaaaaaaaaaaaaaaaaaaaaaaaaaaaaa

SEQ ID NO: 58044 - DNA, 554 bp, Homo Sapiens
acataattttctaggtaattaatgatcctatccatggccacattgagctccaccctctcctcgtccgaatcattgatacacctcaatttcaacgtcttcgatacatcaaacagctgggaggtggttactatgtttttccaggagcttcacacaatcgatttgagcatagtctagggtaagaagggaatggggtggggaacttgcagtttttaagtattttctctgtctcatgaaatagttatcttaggccaggcatggtggctcacacctataatcccagcactttgggaggcagaggtgggtggatcacatgaggtcaggagttcaagaccagcctggccaacattgtgaaaccccatctttactacaaatacaaaattagccagacatgattgtgcgcgcctgtaatcctagctactcaggaggctgaggcaggaggatcacttgaacccaggaggttggtggttgcagtgagctgagattgcaccatcgcactccagcctaggcaacaagagcaaaaccccatctcaaaaaaaaaaaaaaaaaaaaagatc

SEQ ID NO: 58045 - DNA, 944 bp, Homo Sapiens
gacgtaagatcaaatgcaatagcatgtcaaacaatgtgtaactccagttatacaaacattactgtatctcattggggatacgaagctctacacacttgaagatggtgaaggaatataaaaattatcttacagacagcaagttgaacattgtgggatgcatgagctattgaggcctttgcagctttctgctacatggaggctagggccagagtcaagatttatgctttgcagcacactggtcagctgtttttgcaaatcagattaaatgatttttaaatgaggctgagagcatggaagatactaatgtgtgtttccttgtgagctactgcataagttaggaaattgaaatacagaaagatgaaaagtgatttgcccaagcatatagatcaaagctgtggcagaaccaggactggaacctatatctctctactaatggtttttttaaaaaaataaccttgtttcaaaaatattaaaaagtcacaagaaaggtaaacatgtggataaacaaaatgaagaaaataaaaattatccagtaataacatattggcatatgtctttctggtatattttcctgtgttgtcatcattatcatctccatcatcattatatccatcattatcatcatcatcatcatcatcatcattatcatcaccatagtgaacatgtaatgcttacctagtgccagatgctgtctaggcattttacatgtgttactggtaactcatgtaatcctcataacaaccttataaggtggttgctattatccccatgttacatatgaagagacagaagcataaagaagttgcaccgctggtaattggctgggatttgaacttaagcagtctaaccttagagtaatgattttaacaactatgctatatacatacaaatttacaaaataaaactgggctcagacaataaaaaaaaaaaaaaaaaaaaaaaaa

SEQ ID NO: 58046 - DNA, 800 bp, Homo Sapiens
aggacaaacctttcctcagagttgctttatagttgtgggtctgagaataaattcacagattcacccactgcatgctttgatggtttcacgtcaggaatgggcctacttttcctcaggtgagagcggaatcctgctgtacaagccacctgtaatgtgggcagtggcaactgctgtttcctttccaagtcttctgaggttgtttcctagtaagtgagctggaggctatggggcctggtcctggtggtagctattttgcttttggacataaaatcttggtagcttaatgtatttgttcctagggctgcagtagcaaagtaccacaaaccgggtggtactggtactgtgggttgtcccgcagttctggagactggaagtctgaaatcagatgctggcagggttaatttgtcctgagggctgtgagggagacacagctcctggctttctcctagctgctggtggtttgctggcaacctttggcattccttggcttgtggcatcatcactccagtattcatgtgatattcttcctgtgtgtgtgtctctatgtcaagatttcccctgtttataagaaaaccagtcatattgggttagtggttgagcccaccttactgaccaaataaagtcacatgtcgaggtactacgggttaggatttcaacatgtacattttagagggacacaatttaatctataatagtgtggaattttcttttgggtatctaccagtcaccaagatatttatccctacttgaccagccaccaaaaaaaaaaaaaaaaaaaaaaaaaaaaaaaaaaaaaaaaa

SEQ ID NO: 58047 - DNA, 542 bp, Homo Sapiens
gaacgtcccgcaggggtggtgtgctcttctctaaaaacatttttttttttaattttgtatatttttccgccagaagcagtcagttccctgcacccagcacctcacagcccttcctccgtgcgccctgccgggcggcgagctaggcggcagcggcgcggcgcgggctcggcggagcggcccatgtccggcgcgggcgaagccctcgctcccgggcccgtggggccgcagcgcgtggccgaggcgggcggcggccagctgggctccacagcccagggtctcttcagcagatccaggactgccgcagctctctgaacaagcgtgcacttactccatttcatctttctgtttcttgttggctcctctaccacccggttgataattcaggtttctgtgaccagtagctttggaatggcttatgcttgttttcaataactggtttgttttgaaataaataaacaaggtttataagaaacaaaaaaaaaaaaaaaaaaaaaaaaaaaaaaaaaaaaaaaaaaaaaaaaaaaaaaaaaaaaaaaaaaaaa

SEQ ID NO: 58048 - DNA, 363 bp, Homo Sapiens
  misc_feature (101)..(101): n is a, c, g, or t
  misc_feature (103)..(103): n is a, c, g, or t
  misc_feature (194)..(194): n is a, c, g, or t
  misc_feature (288)..(288): n is a, c, g, or t
gcttgtttatattttctaaaatgtctataatgaacatatatcttgataggaaagataatgccaagaaatcctaatttaacacccttttctcttttcctggncntttcccaatttgtttctccacttaatccctagcctcaccctagaggccacctcctctcctgaaacccacaggagctaagtagaaatttggncactttcatcatgatcacccatacttcaaataattcatatatgagtaatgacatatgatctctgaaggggacataaaggaacaaaggatagggnttataggttttaaggatttcagtgggggatggaaactggaattattcaccatcccatttaaacaggggtttggaa

SEQ ID NO: 58049 - DNA, 390 bp, Homo Sapiens
ccgacagggaggctggtgcgcgccaagctgcgggaggtggagcggcagctgcactcgccgcctgaggtcgagggcgccatggcggtgaatgacgggctgaaggcggagctggagatattcggggagcaggtccggagcgccaccgaggtcggggccggcgagggagaggccggacctgagctcccccgcgctcgcgacgaggaggatccggagccgccggtggctgcccctgacgccctctaggccagcaggacccgcccggtcccgaccttccctcgagacccgccaagaaataaaggcgatgatttccgaccaaaaaaaaaaaaaaaaaaaaaaaaaaaaaaaaaaaaaaaaaaaaaaaaaaaaaaaaaaaaaaaaaaaaaaaaaaaa

SEQ ID NO: 58050 - DNA, 1582 bp, Homo Sapiens
agcggaggagagttggtgagtttggggcaggtgcaggggagtggtagtctaagctgaggaggcctacaaagactagctagcaaagggcatggggcatgtttaaggcgcggtgacctaaacccactcttctgtattctctcccaggagaaggaggtacaagaagggtgagtgggttgactcagaaatagaacttcagaatttaaaaccttaagctggattcagaaggttggccttggggccataaagcagcagagcatggatgctaaggctgtgggttctggagttcagacagttctgggttcaaatcccaactttgttcataagtcatgtgacttcagaaagattactaatcttctctaagcctttgtttgctcctccataaacgggataattgtttcatgatagatcctcagtcagagcagaattaagtagagccctgctttggggaaatgaaaatagaggtaacattctctgagcactttctctgtgtctagatctgtgctaagcacagatgcatatgcacagtaatatgcatattactcaatccttacaaaagccctgtgagatctgtgtactttttctcatatttctagtggtaggaacctgagatcagtgacccacccagtaaatatttcagtgtgaaatagtcctgtagaagagggaggagtaggtggtgggcctgacaggtgtaatagggttgctgggtggatggtcccagggcccactgaggttgtgattgtaggttttaagtgagaccatcaacatgttgtatttttgttcagccatattcagttgctcaggtgcaggaacagagcagatggggagttggatctaattaggttcaagtttagccaggtaaaatcagttgatgaaaagaagaaagtccgctgggcacagtggctcacacctataattgcagtacttaagggaggctgaggcaggtggatcgcttgagcccaggagtttaagaccagccctggcattgtgatgaaaccccatctctacagaaaatacaaaaaattagccagatgtggtggcacgtgcctgtagtcccagctactcgggaggctgaggtgggaggatcacctgagtggggaggttgaggctgcagtgagttgagattgctgcactgccctccagcctgggtgacagagctgagaccctgtctcaaaaaaaataggaaagaaaagaaagtatatgcaagaagtgataagaatgatgcctcatggaatctgagctgagtacgggagagaatgagggatagtgaaacagttggagggttacaaattataggtttcatttggaattgggctacaaagggtgatcagaaaaaatcagtagtggttggagactggatggaattgaaattacaggagaggtaaacataagctcttaactactctgctatgctgcctctgctgccctcagggcctgtgaaaggagaggctgaggatgtgctatagaagactcacaagaaacaaccgtagtcaggtgggaggaagccagagtcttggactaggctggaacagtgggaacagagtagaagaaataaaaagaagaatggggaaaaaaaaaaaaaaaa

SEQ ID NO: 58051 - DNA, 1757 bp, Homo Sapiens
accgactgcatggtgaagatctggcggcaggagggccccctggcactctacaagggcctgggccccgcctacctgcgcctgggcccccacaccatcctcagcatgctcttctgggacgagcttcggaaactggctgggcgggcccagcacaagggcacctagacgacggccctcacccccacgtcctgacacggccggcacttggccggaagtgagagcctgctccaggacaactggctgtcccggggcgggccatgggcccaggccctgccagaggtcccgggagagtgtggacagctctggtccatccagccccttggcccacccaggtccagagcatccacttcaagttaccacccattctgtcttccagacagttctcttccttctctgtactgcgtactgggtcaccacatcccagagccttgctcagttatagcaactgctgcgggcgtgcacatggcataggcccagtaacttacatacatcggctcacttaggcctcagacagcagcacgaggcaggcacttttacttcttttaccattagaaagccaaggcctagagtggtgggctttgaccacagccacacaattttgaagtggcagagccaggactggagcttagccctgctcaccctagacctatgcgcttgacaagtgcgtgactgtgacaggcccatgggcccggactgcccataggggtcactgtaccatggcaaaggctgaggtgcaccaggaggctgtggcgtcgtcacctgccttatttgctggagaagctgtagcaaagaaccacagactgggcgacttagacaatagaaatgtattttctcacagttctggaggctggatgctggagaccaaggtgtcagtgggctggtttcttctgaggcctctgtccatggcttgcagatgctgctttctctctgtgtctgcacatggtggtccctcgatgtgcgtctgggtcctgatctcctcctcttataaggacacaaatcatgttggcttagggcccaccctcatgaccccactttaattttttttttttttttgagatgaagtctcactctgccacccaagctggagtgcagtggcacgatctcggttcactgcaaccttggcctcctaggttcaagcaattctcctgccccagcctcctgagtagctgggattacaggtgtgtgccaccacacccggccaatttttgtatctttagtagagatggggttttgccatgttggccagactggtctcgaactcctgacctcaagtgatccactggccttggcctcccaaagtgctgggattacaggcgtgagccaccgcgcctggcctcagccaacatcatctaagggctctcacggagggcctcccagctgcccgccctgtgggcatttgcacatatcctgacaagcctgaaagaagctccgggtgcccattgttcagtccaggtgcccattgttcccgggactgaggcccgggaaagggaagcgacgtggcagggccagcagcagaccctgggcctttctctagactgagcaccattccccgtgggtgtgctctcagcgccgcaccgaccttcacactgcagagatggatgccaactccctggcaggggcaggactgctgccgagcagccccacctgccctcccagccacaccccaagtctgtaagggccgctcccaggaacacctgctactgcacactccaaaccaataaagttttatattttgtttacttcaaaaaaaaaaaaaaaaa

SEQ ID NO: 58052 - DNA, 3731 bp, Homo Sapiens
ccacgcgtccgatctgtgtcactcctgcacaggcaaggccctctgcccactggaggctgagtctttgtctgagcagattcatatcttttctgtttctgaatttcccagggtgcctcgtgtagagcccttagtgccggctcactgcagagctgagtgtttccagttcaaatgtgtgttcccagagtgggttttgtttcccatttaagaacagccttcctgtcatccagcctcaaacaggttggcctggactattctagtcttaggaaaggtggcccaggtgtgaagccacaggccacactgttgcttttagcacatgtttcacagcgaggaacagggactctgccctcagttttctctgttgggttactttcatgtctactcaattgagagttttaaatccttttatttctaaagatcgcctggttaacgtatgaagctttcttgggtccatgttggcctgttgtttaatgtttctcatttgcctgcgtatctggaaaaaaacagactcatttgcacagatagaaacaaaagattgtgcagatgggagccacgcatggaagggaaggaatactgatctccctaatgcatcttccttgcgaaacatggagctgctcaggaaagaaagggcccgtgattcaacagttggggaaatgtgggttcaacgggctcccttcctgcagaccttcacggagcctttgatatgtagtgatgagcttcctgaatcttgatctgcatgctgagttcctcagatgaggttaatttgaccacaggagtgtggttccatggaactagtattccttggaatgtgctttgagaaaagttgccataaagactatgagtgtcaaagggatgaaggaagcaggagttcaggctgaggatgagccagtgaccccctgctctggccgtggaggggagggcatcactaggtgaagcaagccctcaggaacaaatctgcacctgtgttctgagcccactccactcttgcaggccaagactgcccacaccacaccaatgtaatagacccagcttctctgcctctccagggaaagccgttagggtactgcagggagggggtcggtttcgccaaccaggctcattccctcagtcacctcccaaggatacagtgtcagaataacagcttctgaaatgagttttctccactcatgcaaattgctctctgactttgaacacccacgtgagtagaagcagtgttttggctgcctggttggtgaaggaggaacatcacagggttattttttcccctagcaaatgcagacaataccctccctctaatcaacaggttcataagcgtttgtctgagaaccagaaatgaatttacaaggggctctctcctagccttgtggaattagagcagagatattgctttcttttcacttcagttaatccaaatgagctgagtctcctttctatagggaagggcaaaacaaaacaaaaacctaacccagcaaaaacaaggctttcttactgccaaactggggctccgaaaatagtttgggtcattggaatcatgaaagaaatagtgtttatataacctctctcttgcagagaacttgaaagtgatttcctttcgttttatgcaaataatatatgggatttatattacccactttgtcaaactcatcttccttgtatgtgtttggaaagcttattcactggtggtcaggcttcttgtttttcttctgggtagactgccttttagacaataaattctgaagtctttgttaattccgagctgggaggatacaaatggcggtccatcctgagtgtgggaaggagaatcagtttgaaagagctcttttatctgcactccttagactttttagtgttgtttcggttattttagtgtattgccagactcacggagaacttcgtttgtccaaagctccacaaaggctgcaaagataaaccaagctgtccatgtccttactggcagggatcacagagtctagtgggtgagagagtgacagataccataatacaaggcaagtaagtactgggtgcatgcaaagtgctttgggattgtaaaagagaaagagaaaaaacccagccaagtagggaggggaaaagctgccatctgagcttcacttgcaggctaggttacatttcagcaggcagaggcaggcaatatggccctgagcaagggaagtacagaagtgggaagtgcaggggacttcagatcacggggtgagggaggaggctcactgagagagaagaccagtactgtgctctgtggggccagctcatgagaccgcaaagatagtagcagctttgatgccaggctgggaattctgcctgcgctgttgggagccagtcacgtgttccacacaggtgagtggcctgttcagattctgtccctgtgtgctccatcctagtggtacctgggagttgtcatctccgtgcctctcttttttctgtccccaaatctccagttatcagtctttctattgcacccaaaaaaactgcttgcctctctccctagttgtatgtggtccctgtgtcctcatcactcatccatcaagtgacaaaactcttctcttaaccttcagccttggcctcctctggtctaccctttccatgctgccagagggatggttttaagctgcactggccatgttcttcccctgctcaatacctggcagcagccctgtcatctccccaggaaagcctgagctccttggtgaggctgatgaggtcctcccaggtgcaggtgcactctccatgcctctgccttctcacgcactcagctttaaccacaccaaactggatgcacttcctctctcttgtctctttaaagggactgtgtcttctgcttggaactttccctttgtgaactcccatagccatccctcagccaacagacatctgcacgcatgccagctccctccctcccctacccggtctattgggttgcgtctccctccctctattctcatagtacttggtgccccctctgtgcacacagcccggtgctttatggttactttttgcctgcctgtccatcatgtcactagatggtgagttcctcccagtgcctagctctgtgccaggccaatgataggaccccaggaaatgtgtgtgggagagattagaaggagagagctggaaggaggaagacccatttggagcccagggcagcagccaagccaccttcatttgtcccgacgatcatgctggtcccagagttggcctcattcctccagagggtggtactaagattactggagaaaacaaccagggggaagctcactggtatataacatcagctcccttctcctcgtcccaggaggaaatgatatttccatacatcctaaacatccgcctccttgcagcatctgcggaagcttgcttgagtaatgaaagataatcagcaatagttgaaatttcctatccttgggcaggtctttttttcctactatattatgtatttaaatacatagacatatttaaccccacctaccttttgggccaagtgtttatggactagacttgttcttccccttagttttggaggtccagtggtgagtacctctcacttttcagagccagaagtgctgcttaaaaatgtgttcagatcctggccgggcgcagtggctcacgcctgtaatcccagcactttgggaggccaaggtgggcgtatcacctgccgtcaggagtttgagaccagcctggctaatatggtgaaaccccatttctacaaaaaaaaaaaaaaa

SEQ ID NO: 58053 - DNA, 3218 bp, Homo Sapiens
actgatcatggacactctggagaagaaagacttcctgaaggtaggcgactgtacctctcttgtcctggaatgggcgatggctgggagaagtgaccaggccccaactctctctccagcctcgcctgattctctaagacttgccagcccttctcctgacccctgcaccgcctcctccaccttcgttcattcagcaagaatgaactgggctggggtgaaggaactctgcaggggcaggaggagaggacaaaggaaggaaaccaacttcatcagtgttactccagtggcttctgacacacagaaggggactgtcatagtcatgcttgatctcatgctcattcttttaccccctagtgcctccatactgagaggtacacacgggtgaacacgcacacacagacatgaacaggacacgaaagcaaagcacaggaacaagctctggctcattcacagaatcatttattcacaaatgtattgagtgccatgcaccaggcatgtttttagggctgaggagatggcactgaacacaatggttatggcccctgtcctcatgaagtttatagtctgatgcagaaaccaataaacaaggaggcacccaataaatacattcttagaaagtgtaatatgtgctttgtaggaaagcaatgggggtagtgtaattgagattcatgggggagagctgtttagataggatgatcagagaaggggtctttaatgccgcaaaggatgaggagagagccaaataacgcagagaagagtgtttggggtacagaaaacagtcagtgcaagggcactgcagtaggaggggcttgcacatttgaggaacaggttggtggtccctgtggccagagcaaattgagaagagtgccgaggaagagatgtgcttggaaagggtcagattcatgccactgggatgggaagaggtaagtggaggttcacaggaggtttcctgaagaaatcagctcctggaggaagtgagggaagaaaaaaaagggccagggagtgccatggcaaccaattctgagaggtgagaggtcatgggatgccggggagggtgatcagcagacaggcctggctggagtggaagggcgtgatctggaggtcccagccctgtcattgccttgggagaaagaaaacggccacaggtctaagggctccaaggcaaggctgatgggatagagctatggtgggtgaaatggggtgacagtgaggcaggggacacaagccgttccattgtctttctgtctctccacagcgccgcccctggctgggggcacccctgcaggtgggactggtgggcttctgcctggtatttgcaacccccctgtgctgtgccctattcccccagaagaggtaagtgctgtccctgggctgggtgggggactctggattggactctgcatctctggaccagctgacctagggtcttccagggtgttcaggaggaggcctggcaggcactccactgattctgggagtgggggaatgacagtgagccagtccttctggcagtagaaggagaggatttttcagcctgggaggaggtgggatggcaatccctgggcctgagtggggttggattcaggggacgttaactggcctgtgctgttctattgcagctccatacacataagcaacctggaaccagagctgagagctcagatccatgagcaaaaccccagcgttgaagtggtctactacaacaaggggctttgaggagggtcagcctctgtcccctccctcacttccttgggctgctgctttagtggagtcatgtcacccctaccacttggctatctgcctagcactgggcaggggccttggtgggcagatggcaattgagggtagcaacctattagggtgggggagggacctccataaggcttttcctcccttctctggtttcaaagatcagagcacataacccctcctgtgcttgagtgtccatgcatatacatacatgatacacatgtgtatgtgtacattgggtcctgaaagctagaagcaggcatgctagcctagtatgttctgacatctggcttcccttctcagcctcatgtccacctgcctgccagccaggctacaggtgtgacttccttctctaaactgttacaccagccaagttatttttgatggcacctcatcccttctagaaataggaggagccccaggatctcaggacagagacttatagacactagtaggacaaagcgggctgaatccttcaggtttctgatacctagctccccaagctgactgggctggcagaggagaacatgttgagacaagggaggcaggggacttatgcatccctcagtgccatcccttgtatcctggaatagctccatttcccctcctcctctctaccagacaaaggagtgcctgtgtcctgtactgccctcgctgtctcccccaccaccctacttgacagcgtgggcatcttcaggcacagccttgggagttcctggtgtgctctgacatcatgacctcaaatctaaatcctccaatcccaactccctttcccaaacaaaaagccacagaggcagagcaagcattcccctttaagagcttccactgcaccccctcccaagggacacagcggtaggaatggtgcttaaactccacaggtatcagagagggtgtaactaggacatcctcaagggcagctaggccccgaatgtacaatgttaagacagggaattttgtgttccattgacttttttttttttttaatggagtttcactattttgcccaggcggaggttgcagtgagccaagatcctgccactgcattccagcctgggcaactgggtgtctccagtgggagacactgtctcaaatttaaaagaaaaaaaaaaaaaagaaggtataaatcagtatgccagatcttactgtgattactggatgtaagtgaccttctaaccttaaggctgcgaatataagattagattctgttttcaccaaaatccaggaatagacaaaaagactgatacctggtatctgtacctcattgagtgaaaggagttaattaagttcctcaggggaactccggagattcagggtgtcttgttagttgtaggatgccttcagtagcttacaaacaaaaccataaccttcctggaacccagcactctggaaggccaaggtgggaggattgcttgagtccaggagttcgagaccagcctgggcaacatagcaagacctcatctctattttttatc

SEQ ID NO: 58054 - DNA, 612 bp, Homo Sapiens
gccgctttttttttttttttttttttttttttttttttttttaaagcaggatctcacttggtggcccaggctggggtgcagtggcatgatcttggctcactgcaacctccacctcctgggctcagttgatccttccatctaagcttcccgagtagctgggactacaggtgtgcaccaccacctctggctaatttttgtattttttctagagatggggtttcgccatgttgtccaggctggactcaagctcctggcctcaagtcatctatgctcctgttggcctcccaaagtgctgggattacaggcatgagccaccgtgcccagctgaaagcctaagtctttagttccatacaaggtctggaagtctcatgggcaatacaaaaagaggtttgcctcacctctgaaggcgagaaagcagccataggactgcacccagttctctccccgagagctgggttctttttcttactgatttgcaattctctatatgccctggatagtaaccattctcagtgagtgatatatacctgttggcatcttctcctaggtagctgagagtcggcacctacagacagaacattcagcaactcccctccctgagcgccacgctgg

SEQ ID NO: 58055 - DNA, 720 bp, Homo Sapiens
  misc_feature (308)..(308): n is a, c, g, or t
  misc_feature (371)..(371): n is a, c, g, or t
ctagaggtgccaaccagaacaagctctaatgtctgtctcattcctgagccttggtgccttgacgagtcaccacgctcaggaagaaagctgcaactcgccaggatgaaattgggccccacttcttagaacccttccccgcttccttcccctgccagaaccacactaaagaattcgctgctctcaaagacagacgttttcattacttccttacattatagagttgggcttagataaccagttgtatgagtagtaagtcaaacagaaatacaacagcaataatacttatttctttccctaatgtaatatgntgtacttcataagccatcatatgcatttgttgcttttcccccttctacactgaccagtagttntgctttgtttgacagaaaagtatagtaagaagaaactgaatttgaagtggattcttacaaaggaaaaagaaaatcactattgtaactataccaaattactatgtatgtgagctcccagctttgacatcaagtcgttacagccacgtaatgggattacgggtgatttttactttattctttgggcttctctgaattttcctatattttgaaaaagcacctgcattatttcgtaattataaaaaagtataaataagaattatacacactattatttcttcactgctatgacatgactagattacaatttttttcttttcgagatgactttcggtcttgtttcccaggctgg

SEQ ID NO: 58056 - DNA, 2368 bp, Homo Sapiens
ttggatttgggcctaggctttcacgctgaactctgctatcttttcaaattgaccttcagttgagatttctgtatacaaccaactgcatgctaggcacctgcaacccacagctgaaaagctaatgtgtctaaaatgaaatcttccctcccagaagctctgtcctgtgttcctagtctgaatccattgtctactgaagtctcacagttcaaactggagtcaccccttgcccctcccctactgctgttacccaacatccaattccttctgagtctacttcagatctcaagacaaacccagttaacatcaaggatttgaatggaactgagtctggaatgaattatgccacattgctaaatttaaaccaaacagttgatctttgggagctgtttagctatcagttaataagaccattttaaaatggaatacctatcaatacgtggcccccagacaaatacctatgaacttttagtgcagcatagcagtctttagagcacacatgtcttgagaactgactgaggaaatgaaattctgaaaaaaatgtcactaaagtccagagaacatatactgtgaaaaatacacttcagtaaatcagaaaatagtggaaggacagcttcatggctttcacggaattgtgaacatgagcagttgtgttttttcacaatggttaaagtgttggattaaagctatacgtaattgagaacctgtattacagctaaaatagcactaaaaaatttgaaactgctgttatcttcaatttctcaaacacttaaaaatacctgcatggaaataaaactgcagggcctttgaatatagggaattcaggatagattaaatagtggtaatgatgccaataattctatgcaagttaacaggccatcttgtatggatgggagttaaaggaaggttgaaaataggatatctctgcagtgcttactctatttggatttgcagagcactgcttctggtgtagaaatgtaagctagcaataaccaagggaacagaaaccaccatggctgttcattgctgggtcagaattttttttttttttttttgaatttaaatggaaacagtctcgctgtgtcacccaggttggagtgcagtcgtgcgaacatggctcgctgcagccttcaactccctggctgaaccgatcctcctgcctcaacctcaagtagctgggactacaggctcacaccttgacgcttggcctggctttttttttgtggagatggggtcttgccgtgttgcccaggctggtctcgaactcctatgctcaggcgatccaccctcctcggcctcccatagtgctagggttataggcgagagccactatacccagactggattagatttcttcacatgacatccgtagagtgcctgtgtgtatgctctgtggatgtaaaatgaacaggcaagagtacagaagtagaatctctagccatgcagtcagacagatggctccaaaattagttacttggttatggagacgatcaagttacttgactttgagcctcagttatgtgccaaatgaggatactaatagtatctatctcaaatgcatatatgggtgttcactgtctctgggagacattttccaaagaaaccaagactaacttgttaagggaatagatttctctcactgatacaggatgtgctctagctggcccacgatactgcattgaattacagtgtttcctaagtatctgtgggggatcagttcagtacctctcttgaataccaaaattgaggaagttcaagtccctgatataaaatggcatagtatttgcatataatctatggcatcctgtataatttgtcatctctagattacttgtaatacctaatacaatgtaaatggtatgtaagtagttatgctgtattcagggaataatgacaagaaaaagaatgtctatacatgtgcagtagagacaattttttttctgaatacttttgatctacagttgatcgaatctacagatgcagaacccatggatacagagggccagcagtacactttgagaagtgtattcgaatccccggggacatgtcctttttaactgcattctcctccgccaaaaaagtgaccaagcaggtataagtggagaaacagccaaagctgaagtgtattcttttttgtttaattgtacttcagtggatgcaaatgaaattttatcttttgaaagtaagaggaactatggcgtgagccaccgcgcccggccatgatttttcttcttttttaaggctgaataatatctcaatgtatgtatatataccactttttaaaaattcattcatctgttggacatttagattgttcccacctcttggctattgtgaataatgctataataaacatgagtatgcaaatatg

SEQ ID NO: 58057 - DNA, 450 bp, Homo Sapiens
  misc_feature (107)..(107): n is a, c, g, or t
  misc_feature (346)..(346): n is a, c, g, or t
  misc_feature (354)..(354): n is a, c, g, or t
  misc_feature (382)..(382): n is a, c, g, or t
  misc_feature (396)..(396): n is a, c, g, or t
  misc_feature (409)..(409): n is a, c, g, or t
  misc_feature (416)..(416): n is a, c, g, or t
  misc_feature (442)..(442): n is a, c, g, or t
ttggtacagatggtgtcttgctatgttgccaaggctggtctggaactcctggcttcaagtgatcctccccaccgccccaaacccctaccctcctgaataggcgtgcngttgttgctggggtgaatattcctaaaacacagcacatgcaggagtcttatttgtatccttcacaatttaattcaatttcaataactgtgcatcaaacacctattgggtgttggggtactgggcaagtattaggaaaattctgaaatggagactagtttctcaaaatgcttttaagggaacaattattaggacactatcttaacaaggagggtgaaagaggaggaaacagttgacccanctgggccnctggggttatacatatccccttttctgnatggaccatcgggnaattaaatccggnaggtgtnataggggttttaccatgggggctccngggggttt

SEQ ID NO: 58058 - DNA, 443 bp, Homo Sapiens
tttttttttttttaacagaacagtttgttcaaggttacataagaacatgcagaaaacaagtgatttccttcttgccaatttctcatggtaataggttacacccaagatcccactcaattctgtacatattttgaagctcctctgggttctaatacatgaatgcagtatccagagacaaagacggggctgtaaaacacctaatttctgtttccctgacaattccaatgatgttgtgctccctgtcactcatttaaattaggtattctgcactcagagtatttacatgtaatgcacttatgtgcacacacactttggagtttttaaccaactaattcatacacctacatttgtaattacagtcagtgaataagaaccagattggctgagatggaaaatgacagtgctctgtaatgtatccagtttataagtttggattgcccctc

SEQ ID NO: 58059 - DNA, 3822 bp, Homo Sapiens
gcctccgttctctgcatccctccaccccagtatccctgcacctcttcatccctccattcctgcatccctctatttttccatccctccattcctgtatccctgtgccctccatcctccatcccagcatccctccatccctgctctccactctcacttcccttcccttcacagacaggcttttcctgccatcctcagaccccacccagggttacctgatgcctttccagctgcacacggggactgactcacctctctctttctcagtcccaaagtcccgaaagagagcatctgatgtggtcagcttgtgacaaggcgtccaccttctgtccatgacacggaggccaggggaaggtctcactgcccagcaccccaccctgtgctcccaggccttttgaatgttcctcctgctcagcccagtgactgcgggctgtggctcctcctccagcctcccctcgaggtcctggtcttacttaggaggccccgggtgtagatgccttcccacccaccaggcattgccccttttcctggcttcacagactcgggaataaagtttccttctgtttcccctcttgcagaaggagatccggttggcagctaaaccgcgctgggaacaggggcctgagtcctggactagggctctttccccggggctgctgcagatggggaggagcctacacccgcctcccgagtgctaatcagacctgacaggctggagaatggccagtcagcctgaggccaccgcgggacaccacctaggcccagcttctccccccaccagagggcgccagagcccgccaagcctcgtaggagatggcaacagggcctgctgctgccacctagcggccaattccgggaatgaatctcggcacgctcattacccagcgactctgcccatcttgaccctttatgtgaagcagaacagccgcttccgcagtgagcagtcagaaggcgtcgtgcctgtcttgctagtggggaaactgaggctcagagaggcagaagacttgcccaagatcacaccaccgggacccaggattcaagcgcaggcctgcccaggctctctgtggcctcctggctgcgaggaggcagccagggaccaggtgccacccttctgagacacctgagatcccaggcccgagaggatgaaggcgggattacctggagcgtgtctgaatgctggaggaagaagggcagctgggagatgaagctgtcaggatgggccgcatcccatttcctgcctcgtttcagttcaactttccaacagacctccctggctcgtcttgctcttctctaatggacaaacaaacaggctcagagaggtggtgtgacttgcccaaggtcactcagcttggatgctatggaacagggacgtccactgtcccagtctgtttatgggaagccgctctgcaactgtcctgacccaccacatgccccaccgctgtttctcttgccctgaccccttgttccctggaccagggtggcacagctccaggctcttgggcccttcccgagggcaggcacctgtgactgtgtccccaaagacctgagtggctgagggggccccacagagcttggacttcctggaggacaaggaggggtctgccagccacccccaccacgcccgccccagggctcccctggagcttccatgccagccggactcaggtgggtctggaggagcaccgtgcctccaatcagaccttgagatgtgccccctgcccccactgtgccctcccctgcccaggagtctggttgcaaaccctgattaaggggattttatctccaccagagggccagtaggtgggaagtagcttaaacaatgcaggtttataatctcacagttctggaggtcaagagtctgaaatgggcctcatggggctaaaaccaaggtgtctgcagggctgtgttccttctggaggctccagggcaggaaggggaggatccacttctgtgcctttccagcttctagaggctgcctgcgttccttggctcgtggccccttcctccaccttcaagccagcagcggaggcctgagtccttctcatgccatctctctgttctctctcctgcctcctcctccacactgaaggacccctgtgatcacactggcccccccaccggatgacccaggataatccatctccctgtttgaaggtcggctgattagcaaccttcattccatctgcctccttcattccccctggccatgtaatgggattcacagcttctggggattaggacatggacatcttgtggcgggggcataattctgtcgacgacaccaagaaacacttggatgttaaggattcaccgaacactgttcaggctgaggcaggagaattgcttggacctgggaggcagaggttgcagtgagccgagatcgtgccattgcactccagcctgggcaacaagagtgaacctccatcacaaaaaacaaacaaccatcaaaaagaatcaggtataattacatacagtgaaacatatggtgactcaagtacacagttcagtgttttttttgtttttgtttttttttgagatggactcttgctctgtcgcccaggccggagttcagtggcgcgatcttggctcgctgcggcctctgtcttccaggttcaagcaattctgcctcagcctcccgagtagctgggactgcaggtgcacgccgccatgcctggctaatttttgtatttttaatagagatggggtttttttttctttcttttttttttttttgagacagggtctcactctgtcacccaggctggagtgcagtgtcacaatctcggctcactgcaacctctggctcttgggttcaggcagttcttctgcctcagcctcctgagtagctggtagctgggactgtaggcacgtgccaccacgcccagttaattttttgtgtttttggtggagatggggtttcaccgggttggccaggatggtctcaatctcttgacctcgtgatctgcccgttttggtctcccaaagtgatgggattacaggcgtgagccactgcgccaggctgagatggggtttcaccacgttggccaggctggtctggagctcctgacctcaggtgatccgcctgccttggactcccaaagtgctgggattgcagacgtgagccaccgtgcccggccagttctatgagttttgatgaatgtgtcctgcttcttcccaggctccaccatctcttcccctaaaggcaaccaccattctgatttctctcaccaaagactggaaaaatatcccaatacctggatgtatgcctcacgtgtcccgctggccccagcacccagggatagttagttactgctgtgcctggcttcactctcactttttttttttttctttttttgagacatagtctcgctctgtagcccaggctggagtgcagtgtggcacaatctcagctcactgcaaccttcacctcccaggttcaagcgattctcctgcctcagcctctcgagtagctgcgactacaggtgcccaccaccacacctggctaatttttgtatttttagtagagatggggtttcaccttgttggccaggctggtctcgaactcctgacctcaagtgatccacctgcctcagcctcccaaggtgctgggattgcaggctggccttacctggtatggtttttaggttcatgttgatgcctggagtttcagtaattccctcccattcgttgctgagtagcactgcaacacatgcaggcagctatttggggatcttttcacctgttgatgggtgtctggactgtttccagtttttggctgttacaaatgaagcctctgtgagccacgcaaaaaaaaaaaaaaaaaaa

SEQ ID NO: 58060 - DNA, 3017 bp, Homo Sapiens; identical to SEQ ID NO: 24727

SEQ ID NO: 58061 - DNA, 3037 bp, Homo Sapiens
agaggaccacgagcggcccgcggaggagcccgcgccggccccgatgcccagctccgcgccgcgcggacccaccgagcccgcgctcagacgccccagctccgccgagaggccgcttgcgcaggctccttcttcttccgcaagtgtaggcagagcccccggagccatggccagcccttcccgcagctccgaagccactggcaagccccgaggcagggatggccggcccaggagggaggaggacgacgtccctcccgaagagaagaggctgcggctcttgctggaggggggaagcgcacagccccaggacggcgaggacggggaggacgcgccgcggccgggcagggtggagaccggcacccagacaggtggcgacggcagaggagcggaattctccacgagttttgagcagcctcggttttcccaccacctccaaatcatggaagacacagggtaagagcaaagacaaggtggctgtggccgatgtccaccctctcggggcgtcccttctcttctctcctccttgggcagggagtccatcggggtgcaacctggttggggcggggaggaggtgcagggcctggccagagcgggcatggccacaggcaggagacagcgactgcttgggccggggcaggtgagcgcagcgcaggccagggccctacgtgtccgcggtgcgcgcgagcggccagcagagggcgccagagagccacgagcggcccgcggaggagcccgcgccggccccgatgcccggctccgcgccgcgcggacccaccgagcccgcgctcagacacccccatctccgccgtgaggccgctcgctccgggtccttcctcttccccaggtgcaggcagagcccccggagccatggccagcccttccggcagctccgaagcccctggcaagccccgaggcagggatggccggcccaggagggaggaggacgacgtccctcccgaagagaagaggctgcggctcttgctggaggggggaagcgcacagccccaggacggcgaggacgggcaggacgcgccgtggccggccaggaaggagaccggcacccagacaggtggcgacggcagaggaatccttcttagaaattcctaaggcccaatgctgtgtggaagattctgagaaagaaaatagtttccgatctttgggattcccgagatggtccaatctgcaaaaagttcattgccatttccatcaaggacactgagaacaagagtcttatctggattggatcctgggaattgagaagcttcagcagggcttccgctgggactaggatcaggatgtggacacccccaacctggaccgtctggccagggagggcatcaaggccaattacctcatgcagccccctgtcacaatgacctccccatcccacttcactgccatcccagaactctgtacttactgctccgtcactggtaatgacaatgaacatcttcacaatctcaggttttattgcaaagtgattgaggaccagttagaataagttatgctgcagaaactaaagaaatcccgtcaaacaaatggtatgtaatagaaagtcttagggcagccgtgtatattttctcccccaatgactcaattgaaaatgagaagctgttaccgccatgttctgggcagaagctatcaaaagtataagccatgatattataatttgatgatttttcatccttcaaatggatatggcccaggggtgaaaagtagatgctccataactagatgacggtcaagagttataaaaatgaggtcgtctctgttcaacatttctcctttcttgaaaggatactcaaaatcatgctcagggcctctaatggccagaaataaagttcctcccagttccagagcaccccaggacaaccccaaaaccagagcaactgcttattgccatgtagactatgtactgtgcaattcctggggtggcattttcataaatatgtgggtggcgccccctggaggtatgcaatgcacaacttgcacaaatggtaagtcatcgtatcccaaagtccacaaagaagaggtaaacaaaattcccatcgatgttgccatcagtcatgagtctgccttttcttcgtgggacagtagcaaaaccaatttggccaagtgtgcttggatgatctctaagatggaatcagggtctctcactttcagcactattgacatttggggctggatcattattctgtcttagtgggagttgtccggggcattgtaggatgcttagcagcatcgctggcctctacccattagctgccagtagcaccacctcctccagccgcaaccaccaaaattgtctccagacatggccacatgttctctggggggcaaaatcacccccggttgagaagccctgaagtaaagacataatacgcagatcacatgtaagtaagagagcctaagggccacacaggggatgctgtacccatgacaaagacagagtcttaaagaggttaaagaggtggagaaagagaaaagaaatgaagtcccagctgccgagagcaacagatgctgactagatgttgttgacagtcatctttaaactgagttaaaagatgctgagaagccatcagctcccatcctgctctccagggacaacgctgctgaaaaaggcctggagatcaacaaagccccaaacacaggtgcactgagcaaagaaaccagagattgagacaaaaaagacattccctcaaagactactcatttccaagaggggagaaaaagtggagtcatgaaaaacagttgaggctgggtagagtgactcgcacctgtaatcccagcactttgggattactcccaggctgaggtgggaagattgcttgaactcaggagttcaagaccagcctgggcaaaatagcaagaccttgcctctagaaaaagggaaaaaattagccaggtgtggtgatacatgcctgtggtctcagctactcgggaggctgaggtgggaggatcgcttgaacccaggaggtagaggctgcagtgagccgggatcgcaccactgcactccagcctgggttacagatcctgtctc

SEQ ID NO: 58062 - DNA, 2553 bp, Homo Sapiens
ggaagaaaatagccttcagcagaagctgagacaggagcctagaggatggacagtaaggagtcgaaggctcaggatgaggctttcctgactttctcccctaggggactgatgttctctactggtacagaccttgttttattcatccttatgtccctaacctggaatgggcccagggtgacagttataataagtgtttgtcaagtgagcaagtgtgtggagtgtgcattgtagagagtaaggtctctacaggatcctgctggagaggcagcccactgggctcaccacttctccagaggagggactggtcccttgccagacaaccctgccagctggagcaggcttcctcaggggtgcctggagctgttgaccatggctgttgccctctggcccctcttgggaagagcaacctgtcaggtgttaaagacggtcttcatttctcttctccaagtaaacatgactagtttccatctcaccatcttctggccctcagcagactggttatccagtctggagaggcaacagtagtatccagatgtgatccgaacagacagaacgatggatgcagacggaaaattcaggtttgtgtgcttcggcagtcagtatatgcaagtcgtaatggggacagtggctggcatggcctttagcactgtgggaaggatcagggtgtctgcccatcatttttctctctttgatagacactgtttacgtagacactgttttggtgtaaaaccctacgttgtagctcttgtcaacagtgttatgtttctcctcaactgtcctggaaactccctgaggtggctggcttgtaggcactccatacctgttagctagtattatttatttattgttttattatttgaatggacaatcaattcatgtcatttaatgaacatgggctatgtgccagagaccaccaggtgccagaatacaacactgaactacagtaggcctgtccctgggccccagagctcccagacacactaggaagacttgttgatttaatgataaaccttgattgagctcatgattaacatcttcaccaccagacatcattgagtgctctctgtgtgttcaactcagaacatacccttcctgccctcagaggctggaatgtgagagtcattaagggagacaccattgtgggagtgagaaaatcctggacttggagggaactgactagggatcacctcccagctctgccatggacccactgtgtgaccatgggcaagttacttgacctctctgagcctcagttatcttatcagtgaaactgggttaataatatatctctcagtggcacaggaggatcacatagggtcaccacactccacaactccaggagatgctgttaacattttagtctatggatcctctggtggcctaagatttaaatgagagcacttttgctatgtgacctgaagttaatgtcaataagttatagctattgttatgtacaatgtaagcaggggtcactgcaggccagaaggctgacacaatttggccaggctttgttcttcaaggaagggcagggctctgagaagtgcagaccgtgatgcaggtgaaggccaggaggcagggactcccagggcaggtctggaaggagcgaggctggtgacggaagtggtcagcaacctcaaggcatgagtaaggcgcttgcccttctctccaggcacagaggagtcactggaagctgggcaaagagctgggatggatgagaccaaggcgaatactttacttattaagctgcaaaggaccctagggagcatcttgtcttaccaggcaaacaaaggccagggagggaaagtagtgagtctccagggtcacacagcaaggaccagggcccgcgccaagactcccacccctgcagaacccagctcaaatgattccttgagcccagtgtgtggctccacaaaagaaagttcctggcacttttcatatttatttataattttttttctgattataaaagtaattataggccagtcaaggtggctcacgcctgtggtcccggtactttgggaggccgaggcaggaggattatgtgagctcaggagttcgagaccagcatggacagcatggcgaaatcctgtctctacaaaaaattagctgggcatggtggtatgtgcctgtggtcccggcttctccggaggctgaggtgggaggatcacttgagcctgtgaggtcgagactacaccgagattgcactgagccgagattgcgccactgcgctccggccttggtcaacagggtgagattttgtctcaaaaaataagtaaaagtaattataggtcatcatggaatatttttaaactatagaaatataaaaaatatataatcacctgtaatcccaccatccaaagataatcacctttagtattgtgatgtattccctccatctgtattccacaaaaaaattatatattaattagatttgaattgtgtatagtttcacatctcccttttcctctgtaaaattgtgctttatgagaaggagggattgtttttaatgtagaagaaactagaaaacctttttctcaaaaaaaaaaaaaaaaa

SEQ ID NO: 58063 - DNA, 702 bp, Homo Sapiens
ttttttttttttttttttaagtaaatggccacaaaatttaataaatgccttctgataagcataacaatttctatcatacacaccctaactcaaaattatgtcacccgaagatgattctcttcaatgttctggaagttaaatatcgaccaacaaagtcactttataggacagtggggaaatatgtcaaaacttcacacacatcttctacgagtcagtaaaaaagatgaaaaagtggtaactgcaggtggtaaaacttcgacaggatcagcatatacttgacaggaaatgcagcatctcataccactcagtacaaagaaaatgtctgccttccctgactttaaaaaagagtagctatgtaaaaacttaactgacgaaaacagaaactgaaagtaaaaatgtctacagcatatatatgtacaacttaatattgtgaacattttcataccacaaaagttttttaaaacttgctttaaacttttaaaaagtcagaaaaaattttggtcaattggaatcggcatgatgagaaatctcttgaaaaccattctcaattccagttcctataaaatcagactccagacaatatatccagccaaagctacgactgccttcgcgcttctgaagaaactatacaccgcagcatgccctactacaaaccagttgctttttcttccaggaagcacgtttaactttttgtttgtttgt

SEQ ID NO: 58064 - DNA, 443 bp, Homo Sapiens
  misc_feature (11)..(11): n is a, c, g, or t
agtccaccctntctggataatcctccatcctctttcccagactcactcatccagctggtttcatgggaggcgctggtgctaggttccagtgtgggaggaggagattagccattttccccagctggcctggactgcctgtgctctgggctccagcaatccggggatagtttcagcaagatcaacactgagtatccctgacaggattcagccaagggccagtggcagcttcccagcctctttgggtaagagccccttctttttttgctcctcagtccttccagtagtttttaaccaatttcctgtgttccatcctactctgcttgagatatatagagaggtttctacttttgtgtttgagcactgaatgatacatagttccttccatatcagtccatagtgagcttcctcattctctagtcaaaaaaaaaaaaaaaaaaaaaaaa

SEQ ID NO: 58065 - DNA, 412 bp, Homo Sapiens
ttttttttttttttgggatttttagtagagacggggtttcaccttgttagccaggatggtcttgatctcctgacctcatgatccacccgcctcgacctcccaaagtgctgggattacaggcgtgagccaccgcgcccggccaaggagggctgtttctgctgatttttttttgtcacttcccactagaatgaaaatcccacgaggtcaagaaatttgtctcctttctaacatgctgtatttccagcggtgtgcccactgcctgtcatactggggcattccaaatttcataaataaatcacacttttcagaaattgtgattattttattagtttgtttacttttgctaaagagtaaaccgaggtacaataaaaatttaatgggcttatttgagcaaatagtgattcaagaattg

SEQ ID NO: 58066 - DNA, 922 bp, Homo Sapiens
atagttaagatcccccaagagaggaaagaaaactcccctgttgcttagggagaaaatgaagagaggttggtgggagttagaatccttggtgccttaatatttagttatgtgaatgttgtagcagtattgtttgtctataggctactaatttcattcatcactagttgctaagattgagaaatcagttagccaatcattacttttcagttttttgttacataacattgggatagaaacaactgtttctgaagatttcatatccttaaggacatgtttgcttatccatggtgtgtgaaaatgcctgcaatgatttttgtgtttttgtcattttttccttttccaggcatccttgttcatctagcaatatctgaactgcagtgcatttgccttccactcacagaattcgtgctgattatatgtagttctgacccttaggtctctttccgtgttagctcctgccttgctttggctttgtaatagcagtatcaagctgtgcccggcatgcttgagcattgacacaggtgtcagatttaatgttgaatcactttcaggctccaggttcattgtactttcaagcaatagaggctgcatgtcttcagcaccataacaaagagatactctttcatagtttcgtactataaaattaagtcctaagtctctcaatattgattatgggccttcagtaggtagagaatccgcaggacatgctttacaacccccatgaaagggggaccggttatttgcctttccttgaattttcaggcaaattcatgacccctgggccaataggcaaaaataattataacttttggccaagcgggcacaaaaaagggttggaatttaaatccttttatggaactcttataacctggtaacttaaacttgggggaaaaaaaagccccctttcaaaagggttaccacc

SEQ ID NO: 58067 - DNA, 373 bp, Homo Sapiens
  misc_feature (309)..(309): n is a, c, g, or t
gggagagggtttatgctgctgtggaaatatttttccttctttttggttaaatctgctcccccttgtggtataatctaggtcattatagtgctcatatttaatatctcagaaagataataagttcttgagtgtttactccttaccagatgttaggctaaatgcttcgtatacattttctcattcaatcatcacagccacctttgggaaagagatataattatcattcagccctattgggataggatgagggaaacacagggttaggaaactattaactaggtgagttgtaggacctatggaggttggacnttaaattgtctccattccaaatccccctaacccttaatttctcctgtcctacccatcttccagg

SEQ ID NO: 58068 - DNA, 2333 bp, Homo Sapiens
agtgctaggtatctcctatcttcctaaatcccctgaagtaaatagtatcccactttacagatgacgaaactgagcattttgtgttttagtaacttcccatagccagtgaggtgtcaggtttcaaaccattcactccattcgttcatactctgcggcttatttcccatgccattttctggcgtctggcccgggttaatcatttccatacctgcttgtgttagtctcctagggttgccataacaaagtactacaaactgggtagcttaaaacaacagaaggactcccacaattctggaagctagaagtctaaaagtcaggtgttggcagaggcactttccctctgaaggttctggggaagaatctttctttacctctccctggcttctgatggttgtcagcaatctttggcattccctggcaggcagcttcatcactcctccaatttctgctccatcaccagatgatcttctttcttttgtgcctttgtctttacatggccttttttgtcgttgttttttgaggcagagtcttgctccgttgcccaggcagcagtgcagtggcatgatcttggctcactgcatcctctgcctcctgggttctaccaattctcatgccacagcctcctgagtagctgggattacaggtgtgtgtacatggccatgttataaggacactagtcattggattgagggcctttctaatccaccatgacctcatcttaattaattatatctacaaagatactttttttaaaaaaaaaggtaagatgtctatgaggtcacattctgaggttctgcggggatatgaatttgggggggcactgttcagcccagcacactttctggtcataactctgacctttcaccttctgtgtgatgtaatctttcgcacttttccactcctgtggtgcatccctgtgtggtcacaaggaagttgataccagtgtcttggtggatttgagtaagggaccgtctactatgctaaggcattggtaatggaaaggtagccttaaaactctgacttttctgtccattctacaccagactgtatgactggctacacctcagaacttatcttgaacgtgatacgttttgtctatattgatacatcttcatgtagagaataaccttagtttctttatttcttagaaaatctctctacctctgtattatcatttgaactccagttccattgcttcctttacatttctatagacattttgttaattcttgttcatcgttaattagaatttgctaattatgaagagaataaccaagacagagtggtcagatgttcaggtgaatttggccttctagggtgtgtggctggtgcattcttttattttccagtctttaaaatgtgattatttgtttctcagataagtttgattatgcaaactgtgataagtaaaaaaaataccccattacttcatatagttctgacaacttatgctgtaacacatttaaatgagtaattttgttttgaaataggttggccttggggaggcactattagaggctgaaactattgaagaacaagaatctccagtgaactgctttagaaaattatttgtttgtgatgtccttcctctaataattaacaaccatgatgttcgattacctgccaatttattgtataagtacttgaacaaagcagctgaattttatatcaattatgtcactaggtctactcaaatagaaaatcagcatcaaggcgcccaggatacatctgatttaatgtcacctagcaaacgtagctctcagaagtacataatagaagggctgacggaaaaatcatcccagatcgtggacccttgggagaggttgtttaagattttgaatgttgttggaatgagatgtgaatggcagatggataaaggaagacggtaataaatagcttatttccagaattgcctattgattcttttggatccttataaaaacaaaatcatgctttttaaatctgtgtaatgcgtaagtatagtttttgggcaaattttgtgacactcaatgcaaaagaggatggtttttcattttatcaaaacatttctgactgggcacaatggctcacgtctgtaatcccagtgctttgggaggctgaggtgggcagatcacttgaggtcgggagttcgagaccagcctggccagcatggtgaagccccatctctactaaaaatacaaaaattagccaggcgaggtgatgcgtgcctgtagtcccagctacttgggaggctgaggtgagaaaatcacttgaacccaggacatggaggctacgatgagccaagatcacaccactgcaatccagcctgggtgacagagtgagaccctgtctct

SEQ ID NO: 58069 - DNA, 660 bp, Homo Sapiens
  misc_feature (647)..(647): n is a, c, g, or t
  misc_feature (659)..(660): n is a, c, g, or t
aaacacagagagaaattgttaagtggaagtgagagctcatccaaaaaaagacagagaaagaaaaaagaaaagaagaaatctggtaggtattcatcttcttcttcatcaagctctgattcttccagcagttcttctgattctgaagatgaggataagaaacaaggaaaacagagaaagaaaaagaagaaccgttactgaatcagacagtaaggatagtttaaaaaagaaaaagaagtcaaaagatggaactgagaaagaaaaggatattaaaggactcagcaaaaagagaaagatgtattctgaagataaacctttatcatctgagtccttgtcagaatcagagtatattgaggaggtgcaagcaaaaaaaaaaaaaaaaaaaaaaaccccacaaagtcaaaagacaagtttgaaaaatgtttacagctccacaaagatagacaaatttccttgatgtatgaaaaatgtcaacaaaccaataaaaagactaacaattcagtagaaaaatggacaaagaacaaatatggagattcatagaaatgagagataaatgtcatgatgagaaggtgaggtgctcacttgatttataagagaaatgaaaattaaaactacaccagatgccattttttaaaaacctattacattgngaaaaaattttnn

SEQ ID NO: 58070 - DNA, 622 bp, Homo Sapiens
aggattattacaatgaagaaacaaaggtaagacacgatagaacaagaatgcattccttgggacaatgaaaaccaaaaaaatatataactttggttttttgttccataatgaagttgtttacagaataaaacaataagaagaatcaatgggaaaataaaaaggaaaatccagacattaaagcagcatttcatgtcatcaacatgggtggcttctccaccttcctcaaagtagaatagcaaacttttaagttcccaaggtgtttacctacttagccacacataccatgggcccacttctcagtggctttgatatacctagcatggtctaaagaagtgtcagactaactcatcttacaaaaggaactgcttaataataaaagagctgtgcaagtagcttgtttcatcttaattagcccaagatgatgcttctgaagtgctgtgctttcttatctatccttcctgctgcaagggaagaagactttgacatctttaacaactcagcctcaggaaccagaatcaggagtagcagatcttgcattggcattgtcaaagaagctgtaaaaatgggtgcctaaaataaatttgcctttgtattggaataagctgtcatgtgcaatgtgaga

SEQ ID NO: 58071 - DNA, 913 bp, Homo Sapiens
tgtcagggcacttctccctcactgggcacgtgcctttctgtgctgtggccagcccaccatcgcctgtcctcacctgccatccataccctagcagagccgtgctgctctgagggtgccgggtggggctccattcttaccctagcaaactcaccagaacaaagcccacctgcccaaccctgtccttgtctcatttctcagcttcccgaggctcccttccatacccacagaggcaggactgctagagccccactcatgagaatcacagtcatttcccagcttcctggggcttccttccatgcccgcagaacagagtcgggactgctagagccccactcatgagaatcacagtttccacagagaagaccagtctagcttggactgtgggttcctggttttgcagatgtagagtggtgaaggcctaaccgaggagaggaaacaggagtgtaacagagtctccattccaggaccagcatctcttccctccccttcaggggtttaccttcctgaacttctcagtgtatgaaacacagcaggggctggggaactatacaacccagaggtgtgtttgtttcaagtattttttagagcagtttcaggttcaaaattgagcagaggctgggcgcagtggcttacgcctgtaatcccaatgctttggaaggctgaggcgggctgactgcttgagcccgggagttcaagactggcctaggcaatatggcgaaaccctgtctctactaaaaatacaaaaattatctgggtgtggtggcacacacctgtagtcccagctgctcgggaggctgaggtgggagggtcacctgagcccaggaggcaaagattgcgatgagcccagactgcaccactggacttcagcctgggtgacagagtgagaccatgtttcgaaaaaaaaaaaaaaaaa

SEQ ID NO: 58072 - DNA, 1497 bp, Homo Sapiens
gaggtgaaggaactagttgaatttctaggagttctaattcttcaagatcttacaatcttaaagtggttaatatgaaaacatttacacttccgcttctggcaagcctaaataatttgcctgtgatttttaataaaaaccggatccttccctcatctctcatccaaagcttcatcctcttattaattctaaggacacttttttgaaatggaaaacagcacagaggtggagcagaaatacaggctgtgggctaattctcttaacagtcctcacccactaaaatgatctgtggaccaaggaagttttggtgtcatgacaccatgttcctgtgactataaatatgttgtctttttagtgttctgggcttgctatagagggatgtaaatgcattttcaaggtttaatgttctaagttatttccaatcttttaccatgaatccagtttatttagttggggaatatttcttgagtgacatctattcaatgagcagtagcagatcttcagaatgccatcggagctcatggaaagaaatgatgggttcctttgcctggtaagcttttatgacttaatctggattcttgttattttgacccatttctgcacatcttacttcatgcagctgggttttgtgaccgcacagttttggcggcgggggggggggtcatggaaattgtgcaggtggaattagtaatcaatggttgttaagaatttgtggggttatgtgaaatttggtgtgaagttaagacagctgcaaagtggagtggttttctcgtaggcttaggtgtgagaatgttgggggtaattggttaaagtaagattgtttcataaaatgcagtaagtgtaattctgatgttttcggttgagcagaaactagatcaccagatttggtatggttttaaagatgttcttttctgttgtgaaaaacagaccttgagcaatgaaagcaaagagttgaccccagtgctctcagctgtaaggaggatttcacctaaatgtagcgtaattgttcctgttaaggagaaaaaaaggaattggtatctagagtgaggttgatcgcaagaaaatacgtatgcagttctgtgagtcagatgactttttttgtctagtattatccagaattatgtaagggacaccattgttggaaacaacgttattaggaatttcccttgagcatagtctaatcacttagcaaaataaatgggttctctttcctgctgatatgaaatgacatttaacccaccccgagagattctagagaaagaggacttttgttaaatgttactgatcccagggtcctagaaaatcttcaaggactttatattttaaaatgtagttaattctagaatcttagagggaccttacgccaactgagaaccattggttaaatagccaattacctttatgttagcccttgatatcacataaccccataaatccttaacaacaaatacgttctgttgtttacaaagacaaaaaaaaaaaaaaaaaaaaaaaaaaaaa

SEQ ID NO: 58073 - DNA, 1410 bp, Homo Sapiens
ggggcatcttattgcccctttttttctcttacccgggaagaaattattcttctggcgcatgccatcctctctgtgaataattttctttcttttctttcgtctatttatttaaaatagtgattggggtctcactatattgcccaggctggtctcgaacttctgggctcaagccatcctcccaccttgacctcacaaagtgctaggattacagacgtgagccaccgtgctcaccctctgaataaattcactgggagttactatcctagtgataatgattggagttttcaaggtagattagatacaagagaagaggatggaagaagagaagaggatagaagaggagtaaagaatgggatagtactgagaaactagttcagaaaaaaatggtaaactctcacagaaatacaagtgggtgagtttgcaatagcaacaggggtaacaagttgaggaaaataactgagaaaaaaccttagtgattatcttaggagacttttgagttgatgtttttagggaataaagtagggctgaaacagtatttcaagggcttttggaaatatgtggaggtagtggcaccttttaaccttgacagtaaaaggaactagatagaatataggcagtggaaaagataagtgaatggatgaggaagtctgttggaagaagccactggaagcaacttgaactgtacttggaagagatcattaaaggattatgggccaagaagaaatatgtgggaataaaactaattgacaagtacagttatctttgaaaagggtttaggatacttagggtttattttcctctgatgtagaagggaaagaatgtgaattcaagtgaagagagcaactattacaaagaaacagctgagcatggaagttaactgccgggctatggaatagacagatttcaccttacaccttcttcatcttacgtccttgagcaagtttcttcacttcccagtctcagtttcttcttctataaaatagacataacaatgccccccttttttttgtgaggagtaaatgagaaaattttatgaaatacctaaaactggcatataataagtgccaataaatggtagctattgttaccaacctgccagcacaacttatgtttgtcccatttcttgagagtttataaagactttcttaagtgttactttaagatgtctgcaagcattctgcaggactacagaaaatataaaaatgagtaagaaaatgtcattgtgtcctcaaggatctcataaatcaaaaggtaaaaaaatttttacaaggataaaaattatgatacaaaacttaagatcactttagccctgttgtgagtcaggggtagaatgaagattggaaaactaatataaaggctgctgctcaaaaaacaaaccccaaaaaaaaaaaaaaaaaaaaaaaaaaaaaa

SEQ ID NO: 58074 - DNA, 1349 bp, Homo Sapiens
agcgggggtatgaatttaatatgggaattcttaaactcctttatgactggaagatgagcatcagagtgtctgcgaccatttgatgatattatgtaccaagttttagatgtttggcttttttcaggttatgaaagcgggggatgagttaagaaccactgctgtgaaggattcatcaactatttttaggcagttgggtaaaaatgaccaatttagttttaagaaactgactgtggctccagagtatgttggagaagtgaaaatggagactaggaataacaggtgggagactattagtctaattaagatgtaattataaatctaagctaggaacgtaaaatgagaatgcaaagtaagaaacaaatatggggaaaattatatgtaaaagtaataggacttggcatcttactgatgtgattgattatgagaaaaatgaagcatgtggaggagtccactggacagtaggaaattcagcctaagacttgggtaagagttctgtggagttgtgaattcagaggccagagatgtgatatttaaaattttggttcaagatttcccaggtataagaaagcaagaggattaaagcattgtaattaaactttaagcagtgcatatttatgttatagataagataaacaagaaatctagggatcaaataggattaaaattagtagtgatcattcagtacagtagttacgtactgttattcacaagagtatataaatcaaattacaaggaattaaggatataaacgtgataagaaagtatgcactgtactctttgaggaagtttgccatagaaaggaagaagaaataggatggtagatcagaagtaaagcaggacccagtggggggagtgtttgcagtgaggcagtatgtataatcatttaaaacatgggtttggagtcctctcaggttccatgtttgtaatggacataatgataataatccctttcatttaaggctgttgtgaggattaaatgtgttaatgtgcaaataactttacacagtgcctggtatataataaatgcttgctacctattaactagtatttgtttctaaggctaatttaagtcctagaattgattgcaaggattagatcaggagtatagtggacatgttgggatttaaatatttaaatatagagatgctttttaggaccattgtagaaccagaagagattttttaccaagttcacacagaaatgtaggtgcattggctgggcgtggtggctcacacctgcggtcccagcacttgggaaggctgaggcagaagaactgcttgaggccaacattttgagaccagcctgggcaacatattaagaccccgtctccaccaaaaaaaaaaaaaaaa

SEQ ID NO: 58075 - DNA, 1282 bp, Homo Sapiens
ctaattgctgttggctcaggaaatgtggacaatacgcaggaagggacgccgtgccttacagcgaccggcagggactcggccgtccgcgagcccagccgcccgccccgctccggccaggatgttggaggcttctctatctgagatgtgcacagaaacccagacaggaccagtcggcactgtgtgctgcatgctgcctcctgaccagtctgtgtgacaccgtcggggctcttctggccagacagctcacaatccaggttttcactggtgcctacctagcagctattgacttagtgaactttatgttcattctcttcccagtctgtggatccaaattcaagtctaattcagatcgggaagcccgagagaggaagaggaggcggcagctcagggccagtgtgtttgccctggccctgccgctgagcctgggcccgtgctgggctctgtgggttgctgtcccgaaggcttcagccaccatccgggggccacagcggaggctgctagcgagcctgctgcaggaaaatactgagatcctcggctacctgctgggtagcgttgctgcctttggctcctgggcttctcggatcccccctctctccagaattgtgaggccgggggtggggatgggactgtgggtcacatgacagtctcagggcatctgggagcatcctgagagggtcatggggcggaggtgtggcgtcaccgtgggtgcatggacatgggctcagcttttcctgaagagcgttagtgtgtatgacagcaaggagggggtgtgtgtggagagtgggcagccaacccagggcgtcctgaggacggcgggagcctctcggggaaagcccgtgtgttcttccccatttcctatagcaaatgaaaagcaggctctgaggaagaagcccctgaggctgaacccataagagaaggagatttgacaccggacaggcagccaggtgtgaggttctgtgtagatcaagagtgtcttaggccgggcgcgggggctcacgcctggaatcccagcactttgcgaggccgaggcggggcgggtcgcttgaggtcaggagttggagactagcctgaccaacacggtgaaaccctgtctctactaaaatacggagattggccaggcatggtggtgcatgcttgtaatcccagctactctggaggctgaggtggagaatcgcttgaacccgggaggcggaggttgcagtgagccgagattgtgccactgcactccagcctgggcgacaagagggaaactccgtctaaaaaaaaaaaaaaaaaaaaaaaa

SEQ ID NO: 58076 - DNA, 616 bp, Homo Sapiens
ctgccctgggtgtctaaaagtctggtgttttttttctttcttcctttgagtagttctgaatagcattgaagaagcttaaaacaggaagaaaacctgccttttcaatcaagtttatttatagctactcccccctccaaaaaaaaaaaaaaaaaaaaaactcgagggggggcccggtacccaattcgccctatagtgagtcgtattacaattcactggccgtcgttttacaacgtcgtgactgggaaaaccctggcgttacccaacttaatcgccttgcagcacatccccctttcgccagctggcgtaatagcgaagaggcccgcaccgatcgcccttcccaacagttgcgcagcctgaatggcgaatggcaaattgtaagcgttaatattttgttaaaattcgcgttaaatttttgttaaatcagctcattttttaaccaataggccgaaatcggcaaaatcccttataaatcaaaagaatagaccgagatagggttgagtgttgttccagtttggaacaagagtccactattaaagaacgtggactccaacgtcaaagggcgattttggggtcaggtgccgtaaacactaaatcggaccctaagggagccccgatt

SEQ ID NO: 58077 - DNA, 587 bp, Homo Sapiens
  misc_feature (458)..(458): n is a, c, g, or t
  misc_feature (461)..(461): n is a, c, g, or t
  misc_feature (463)..(463): n is a, c, g, or t
ccagactctaatacgactcactatagggaaagctggtacgcctgcaggtaccggtccggaattcccgggtcgacccacgcgtccggcgagaggatcacttgagcccaggaggtcaaggctacagtgagccatgttcatatcactgcacttccgtctgggagacaaagtgagaccctgtctcaaaaaaaaaaaaattgctgaggaatgctgtgagggaaattagagggacttacagagcacgtagcaagggacctgactccatgtgaaagaactcaagtgcaccagcctggccaacatggtgaaaccgcatctctactgaaaaatacaaatattagccgggcatggtggcgcatgcctgtaatcccagttactcaggaggcggaggttgcaatgagccaagatcgcaccattgcactccagtctgggagacagagcaagactctatctcaaaatcacanaananaaaaaaaaagaaaagaaaagaaactcggccaggcgcggtgtctcacgcttgtaatcccagcactttgggaggccaaggcaggcagatcacaaggtcaagagatcgagaccatcctggccaacac

SEQ ID NO: 58078 - DNA, 462 bp, Homo Sapiens
ttttttatttttataaaatttactgtttcaataagaacacaaatctctttagagaaaatttcaaggaatgtaggataaggacacacaaaaaaactcaccatagtcacaatgaaaatggaaatttgtatacttgtatattcatttctgagtctaaaaatatcacattcatatgggagaatatttggaaacctaagaaaactgtaaagaataaactcgcttatactctcaccacctagagattttaatcgctaacattttagtaggtttccttcttgtctgtttatacattgtatataggatctttttcaaattgttaatataaacaaccccaagtatttttgtatgtaaaaaaataaatatttaaaaatctaagagctataaactggcaaggggatatgtaagttttttaaatattggccattaatgtcagccagacagcatatttttattcttcagctcttt

SEQ ID NO: 58079 - DNA, 3453 bp, Homo Sapiens
tttcaatttcctggcatgcttttaaaatgcgctgcacacaagcaaatggctcctcaggcaagcgaggcccagcaggcagcgtggctggactttctgctcctcttaggcttggtcagtgagtcacttgatgggactggtgtcttgggcaggctgctgtcatgttttgtaaacctaaaaatgtttttctgtgtttctccagtttgaagaaggtgaagaaggagaagaggaggtaagagacaggtttatgcagtgccacttacctccctgaagttgtttctttggctttctctgcttgaaggttatggactcacagggctgtgttaaacccattttttgtgacgctgtctttgattctaagaatgttcttaaaacactaagcagaaatgcatagcaaatgctgtgacagtttccatcgtttttgaccctgcagttggttcatgaaaatgtatcttagaaaataatcatttaacaaaatctactttttcagaattttgtttctttcagggctctctgtgagaacaaaaagatacctagaaataattctaagtgtccaaaggaagtgatgagtcacttgtgggtagcagtaattgatttccatctaaggcagtgttttgctccttgtgtttgtggattgtgaatgccacaagagtttaaatcttgtcattccagctaattctcactttttaaatacaggaattagaaggtgacgaggagggagaagacgaggatgatgcggaaattaaccccaaggttggtaactttggggccacccagacctacttattatgctgcactcttagacttttaaaaatgttccccactttgaggcagtagtgttaacaatattcattattccctaattagaaagtttaaaatgtgtcagaaaaatagtggaatgattattcagacactgtgtctataatttgagtgttgagtgtacatactcagtagaagcttttccagctgtctcaagctgtgtcttatttacatagactcctcagtagagcaacttgactttccaagtgtttcattcttttaaggtaaggtaatgatttaactgacaacataaataaacttttctttgtgcgtgtttggaaaaggtgcaaagaagggactttggggctctttttgttaaggaacagaataatgggattgtgggcatcatttgacccagttgcacttgagctgagcatgcccagatgatgtgtctagatatctcatatgtctcagataatttaaaataaattggaaaggtttactaaagaaaactgagttgaaaatgagtgggcaaccccattaattttacctgcaaatttagatttttatttgtggtctcagagtaacttaaatcaaggtactttgaccatttggcacattttaaaatcagaagtgcttaaatgtcatcctacagcatcataagagtttcttcttgtaaaacatgaaatgtgtagttcacttgcctcttaaaattaagtatattatgggctgtcagaatactaacgttacctggtgtttttgtaatgtgtctctgtccgactagacgttttttgcttgtttttacccttgttttttggagtgtgcactaaaagctgtcagtgtgatattctggctctgtcatcagttggtttaaactggctgtttccatgaatgcatgttcacagttgtggttccttcaaggaagggatgggagaagagcttttaaaacttttttgagaatgtgtcttataaagactactctgggaataatctgctcatggaaatgttcatcttctaaagtttggcctgttgatgtgggaggactctgctgaaagcgtacctgtgcgcagcaccgtggtggtgggcggtgagggctgtaggagaccaaggcctgggtctgccttgcgtgcatcacagtgtgcggacagggaaggtgagggctgtcagtcagccagtgaacaacgttgggtgaataaatgctgcccatcactgctgtgcggggtgtctgatggacccaagggccacgtgtgtttattgggctgtgtttccgccttgtgggcgctgaatggacacttttaaggttgcagttgtaaagcaaggactggggtcaattggcagggccacctcctcagactccgcgcacagctgcctctgtccttgttgcacttgtatctccccctccctgtattctgtgcctcagcttctcttttcctcccctctgttgtttgttctgctttctctgtcaccttggagaaccttgagtctcctttcacgtcccaggtttctaaaagagcattctcaccagccattacagagaacatgatgtggtggattacacatgctaacaccccatgaaacctttgataaacggttatgttggttgggggagaagggactaaaaacatgttccggctaatggtgtgaatgaagttcagagacggcccggcatgtgtggccaggataaggccaagcctgctgtccctgtcacatgcaccttccagagagatgggcagtgttagagtctgtgcaagcaaaagaaaacaaggaaggaagggaggttttagtattgggagcagtctgatagaagtgaaaatcatgcttctgcccattttgaaagtatgatctagtgttgaagttgttcaccccgagttcagtatcttgcagcccttttgtatcatgagaaattgtggccgtttcctcctgtataattttgtgcatttcattttctttcatgctgacagttcctttcaatttttttccccatttaggtgtaatttttgtctgttaatcattcatacgtttctagaaggaacccagccagccggcggaatgcaagcagcagtaggaagcggaggcgggtgcctggcagaccggctgtcgggactccaggcctgtgggcggggcctcggtccttgccgcagcacaatcccgtggacagagcttactccatctaactcgttttcaagtgcatgattttcactttcacttttcctttttccttattattttgcttaacttgtacagtggcaactgaaatgcatttcagaaataggaggtttcgtccagcaccctctgcagccttggtgcctgtagctctggacttccctgggcctttccctgtgggagggccctgtagaccacatcagggtggggtgggggtcacttggcaaaaagggccgaggtctggtgatgtggttcccaggatctggaacctctcccacccctcctgcagttggactgaattcttccctttcatcctgtctgaaggtcctgggtttggtgtgaccgcttggcggctggtgggtggggttttcaagtgggtgacggcgctctccggcagccggggatggccgtgtccgcactgaccaggcctgtggagagtgctcggcctaaccttagaacacatttgtaactgaatacagtgttttcaatttgtacagaatagttagaatattctattaaagtggtgaaacattg

SEQ ID NO: 58080 - DNA, 3238 bp, Homo Sapiens
agcggccttgaacagtgcctggcacataatgtggatgtcagtcaatgttggatttacttgtgcttgtttatttaaaacctatttggggttagattgtcaggaaccctgctacatgttgtgtaaggcttctagtgtgtacgtgtgtgtatttcatataatacatttatgtgtatgagcagttggaattgatcactaaaatatttcttaaaggtaatataagtacaatttggtatgttgagtatcatgaatgaatcaatgcaaagattcaagtatctttgggtagaatcatgtcctttgaaatgtcagtgtacagtaaaaaggtctgacatcataactagattataaatcctatactcttgtactccaaagtcagtatagttggactggcttgtatgtcctgtttgacaaaatataaattttactttcctgtggcaattcccaaactgggctgaccacttggacttttaagaaaatgtaagcactcttgggcattgacccaacgattttcattcactagatcctggggtggggcctaggaatctgtgttttttaataatttcctttctgtaggtgtttacatatagtcagtttctctgctacccacatttcatgatatactttgaaatttggtgacaatcaccttggaccttttgggttctctggaaatggtaaccagtaaggtaattaataattaatatcttatactggtagagggaaagaaatgctaacatgtgccatactaaagatcttttaggactagtgctgactttctgttcatatatttcactggaaagctattgtcaggacattttgcggaaggtgttttttaaaatgtggcatattcatagagttgtattgctggaagttaccttagaaatcatttagcttattcccttttatatttgagttaatcttaaaaatgttagggttagggtgtaccacttattagttaagttgcctcatttctcttagccatggtttcttaagcataagatgggaatgataatacctacctaccttatagttttttttaaggatttaactgaaattcaaaaaaagttgctagcatacatcttgtttgtagcagtgtagcaagtgttcagtaaatgtttaatattttgacatacctataatatgatctatggtatacataaaagccaaaagaggtagaaaaagttatagtaattaagttcaagttaaaaatgttgtacacccacaggcagagttttatttttaaattatggtataatacttatacaatacaccattttaaaccattttaaccatttttaagtaaatcgttcagtggtgtttagtacagtcagtgttatgcagtcatcactgtctagtttgagaacattcttattaccccaaaaggaaacctgtacccattgaggagccacttcctattcttttctctgtatccgcttgcagccactaatctattttttgtctttatggatttgtttattcagtctctttcatatgagtgaaataataaaaaatgacttttcactgtataatgttttcagggcttatccgtgttgttgtgtgtatcttactgcataacttccattttttttaaatgaccgaataacattccattgtatggatataacagccttgtttatccagtaatcagttgatagacatttaggtcccttccaccttttggctgtgtgagtggagctgccacgaacatgcatgtataagtttttgtttgaacacctattttcactttttgggtatacacgtgggtgtggaattgctaggtcttgtggtaattctatgtttaacttactgaggaagtccaaactgttttccacagtggctgcaccattttacactccattagcaatgtatgagggttccagtttctccacatactggccaacacttactttctgttttttttttttttaattaaattttatagccaccctagtgtatcttattgtggttttgatttgcattttgctgatggctaatgacaggcatctttacctgtgatttttgaccattcgtatatcttctttgaagaaatggctgttcaagtgctttgcccactgtttaattgggttgtctttttgttgttgaaagcagtcttttgattatgaaattaatttatgtattcttctctagggggcttatttggaaatatatacttggtaatataaaaatttatttcggaatataaaataaaggactggacttcattactttttaagtaaacttttattggatgcttccttttaatgtattttttttttgtagaaatgaaattgttttaattttatagcttagcctgatgcctgattccatgcttgcactgactctctgtctgcactaacaaattatcagatttattcctttccaaaatatcattgattttttttcagatcatagaatattcctctcccaacttttttgttgacagctttactgaggtgtaatttacatgccataaaatacacccattctaactgtacgtagttcagtgatttttagtcaacttaacagcattgtaccacagttaacacaatgcaatattatagcatttctatcattctgaaaagttttcctcagaccttttggaagtcattttctgttcgcgccccttggtgaacactgatgctttctgttactcttgatttgccttttctgagtatttcacataaatggaatcataatgtatagtcttttgtgactagcttctctcactgaacgtgtttttgtggttcatctgtgttgtcgcatgtatctgtagttctattttttattactgagtagtatttcattctgtggataataccacattgtgtttattcattcactagttgatggggatttggatcatttctagtttttgacttatgcataatgaacattcaagtacaagtctttgtgaggacatcctctttcaactttttattttgaaaaatttaaaccacacagaaagattgaagtaagtagtatagcaaacacctatttactcttcacctagattgactattaacatttgcctgctgttctttgcctttttctataaatataccttttccagaaccatttgtagatattatactttatctcttatgtatttcagcatgaatttcctaagaatgagaacattcacatacataaccacgattttatcacacttaagaaaattagcagtaatctcatgtcagctactttatagtccatattgaaacttgtcccaaaaaaaaaaaaaaaa

SEQ ID NO: 58081 - DNA, 2991 bp, Homo Sapiens; identical to SEQ ID NO: 27120

SEQ ID NO: 58082 - DNA, 2944 bp, Homo Sapiens
taaggaaaactcctttttgcgggtaccattattacctactagtttacatatgaggacattgctgcttggagaaattaaatcatttacccaagttcacaggtcaataacaacagaccctaacccatgagccagtgctcttaataccagtgatcctaaccactgtgtagtctttgctatgttccattaattgtccagggatattattataggtacagtttgtcttttgggagaggtaccagaatttctttcttaagtattgcttaaaccttaccagtcaacagcctttctttgcagaatgaggaaagcatttagtgcccatactgttttcgcagacttaatggagcaggattttgtacatttctttgtggaagctgttcagagaggtgtgtgtaaggggaaaggaagcagtgggaatccttcaccctggtcaggggataaagatctcctgatagactaggaggtgtctgtcagtcactaagattgaaatcttagaaggagtctatttctgtgctggggttccgtccccaaggctggcaacattcacattcctcggcagggaagcgttgtttagaggcatcaacccgtgaagggttccatgaggcctggcactatctgatgtgtggtgtgtatgaatgaagcctctttcctcaaagctgaaatcagtttgagaaaactggaagaatgagtcatttgaggttcttctctctgaacgtgtctacacttgtctctggctgattctatacttgcatagttgtaagtatactgtatagattctatacttgcaaatgttgaaatttcactatgatcttgagtagggtgaaagagaaagacatgatatccaaacccctctccccctgccccattctggtgagtattcaagtttaataaaaatatatgaaaaaggccagattcttttagaagggctttgcttctatctgttgcaacctgtgtctgaacaggtagggcacgctggacgtggatgagcttcctttaaagaaccatgctgctagcgtgaacctcatccacacgctcccttagtgggtcctctcagtttctgtctggtaactggacataggcctcgatggtttcatctgtccagaagggaaaagtacaatggaatgggagcaggttggtatgcagacctgtggaactaggccactgacctacttccttccagctggagtgatgccctttcagatctgactccagccatgtggcacctggttgccaatcactgcccagattggcaggttcctccctgactcaggccattcatctaagtggatgtgactgtttgtaagctcgttggggtgcctcataaactagcttgagaatgtgtaaggcagaggggcctggaaacatagtggctaaatttaaacagtcattcttgctgtatgtgtagacataggtgtagacagaggtattcaggccacaactacatgctaacttgtatggtattctaaataaggtatttggatgatcactggcatttatttactgaggtttcctatgcagagcccagattcctgacttcttgtaacaaaccaaaagatgtagtaacaccagcccctctcccatgctggggtcaagtgcccatttagatggggcttgtcaaagctgtctgttagggatgcattcccacccactccctagtgtttgagtccctgcctgcttcatccattgaatccattgaagcaactgcctggcccctatgggcatttgagtttgcaaccctgatggaaagcgtgtcctgaaatagatgtactggtatacacaagtatgtagacataatctgtattgacacttactcctgctgaggaatgtgcagccagatttctggaaagtgccagtttttaaaatcccttcaatgatttaaacctgctggaagctgtgcatcccatctaaacaatgggatccatagagaaacatactcattggagaattacgaggcatataattttgtctttaaattcttatgagtgaattgtaagaacatgacttcataggaacctctgagacattacagtgttttaataacactttgctgctacatgcagtggttcatttttacttttattaattttttttttcagtgtgtggcagcaggtgccctgggcacctcagccctatctctagcttcatcctcctctgcctctgggaagccgcctggctccctccctccttagggcagaggctccagggggcatgtcttgtctgcgaagagtttacgaggtttcacccactccttcattcttgaacatgctttttctctgcttattaccctccctgtttcctcctgggctgccaacaacatattatattacctccatctgcaaccagagctgctaccaccactgtgcccgagcctgaattttcatagttatattaaaaaaaatcaagggtgcccacaagtgacagcagcttttatggaagccagtcttagcaagatggcagagcacccatttctccatgaggcccaggcttctcagagaagggcaagaactgtcttctgctttggccatcgtgatgacacattgaatgcctgaattcattcactcactcactcactcactcactcactcactcactcactcacctatgagttgttttcaatagatacttgtacgtgttaaaagacacacataggccgggcacggtggctcacacctgtaattcccagcactttgggaggccaaggtgggcggatcacctgacggcaggagtttgagaccagactggccaatatggtgaaaccccatctctactaaaaatacaaaattagctggggttgggtcacgtgcctgtaatccgcagctacttgggaggccgaggcaggagaatcacttgaacccaggaggcgggggttgcagtgagctgagattgcgccactgcactccagcctgggcaacaagagtgaaactccatctcaaaaaaaaaaaaaaaa

SEQ ID NO: 58083 - DNA, 581 bp, Homo Sapiens
  misc_feature (162)..(162): n is a, c, g, or t
atagactgagatccaatgtttaaatctttttatttcagtttgatctgtgcctttagattggggacaaaattttaaaaacaaatcttccaaatgacaccacaatgaaagccagttgtggtcttgaaaaatctctctattgcattacttatcctcacccttgtnttttaagaggtagagagagattactgggaagcagtgagccaacataattgtcctttcctctacagaatagctgtgcagaaggggaccaccacacttaggaccagtgccaggtgacaatctttccgtcatgctgctgcagcattttgcaccttgagagacaggaaaaaaaatgggggtgagggagtggaagatgatgaaactatttctcttttatgtctacatccttactcctcaaaatactttaagctcactcagaccccatataccctgcccacaatactaacacatgtactttgcataagtaaattgttgattaaataagagcaaaactatattcttatgtgtagattaaccaaggctaatttcctggagtttaatacactttggattcaagtaaaaacaatcacttaatgcagcaa

SEQ ID NO: 58084 - DNA, 2541 bp, Homo Sapiens
gtcgacccacgcgtccgggatggtctcgatctcctgacctcgtgatccaccctcctcggcctcccaaagtgctgggattacaggcgtgagccaccgtgcccggccaggttggattttataagtagttgggccactaaaatttctgagttgtacagtttcatgtctttagttggcagaccaaagctgatccactcataaaattttatttagtgctctcctttgacgtgagacacgtggtatatttattggcaccgtaatactggctacattatttgacctcatatttcagtttgtgttgcaaggttttgggcattagagctaatgtataggaagccctgtgcttacatatgctgagtatgagtaagtagtgggttaccaactgtttttgatgaaatatctgcatttcaccaaattgccatataccagtctcaaaatatcctgaaccttctgaaataccttcctaagtgagctcactaacacctacttttctgtgtcctttacaattttttcaccacaaagtctcaaagtttcagaaacggaactaatagggtcacttctgctgaagatctcctgtagtattgaagatatttaacatgtttcctttaattgatattggcctttgagaatttttgtatttgccttatttattaggtttaaagtgtacagttggataagttttatcttgtgcatgctcctgtgaaactacctctgtataatcaagatctgcctctatccgattactttcaccttcactgcccctcttcacatgtgcttgttgtcacttgcttggtaagagtggaatggctggattgtgtggatttttttttttttttttttaagacagtcacactactctgtcgcccaggctggagtgcagtgtcatgatcttggctcattgcaacctctggctctcgggttcaagcgattcttgtgcctcagcctcccaagtaggtgggattacaagcatgcaccaccacaccagcataatttttgtttttgtaatagagtttcgccatattggcctggctggtctcaaactcccgacctcaggtgatctgtccacttcggcctctcacagtgctgagattatactcataagccactgcgcccagcccatatggatgttttggtgtatgtttaagcatccaactgtattccaaagtggtcatgtcagtctcaccagcagtgtataagtatgtttcacatctcggctgacatttggtatagacaatgtttttagtttggctattgtagtgcatatacaatagcatctcatggtggttttaatttctttcttttttttttttttttaaagacagagtcttgctctgtcgcccaggctggagtgcagtggcctgatctcggctgactgcaacctctgtttcccgggttcaagcgattctcctgcctcagcctcctgagtagctgagactacaggcatgtgccaccacacccagctaattattttgtatttttagtagagacgagctttcaccatgttggccaggatggtctcgaactcctgacctggtaatcagcccacctcagcctcccaaagtgctgggattacaggcatgagccaccacgcccagccttaatttccatgtggagtagtgttgttctgtgttccatcacatatccttacatgttctttgccatgccagtatgtttttggtgaaatgtctgttcaaaaattttgctcagtttttttttttttttgagacggagcctggctctattgccccagctggagtgtggtggcacaatctcagctcgctgcaacctctgcctcctgggttcaagcgattctcctgtctcagtctcctgagtagctgggattacaggtatgcaccaccacgccctgctactttttcgtatttttagtagtagagatggggtttcaccatgttggccacgctggtctctatctcctgacctcgtgatccacctgcctcagcctcccaaagcgctaggattacaggcgtgtaagcccaccatgccccgccaattttgcccagtttttattgggctattcccttattgagatctaagggctctttgtattctagtcaggagtattttgttaactgtatattttgcaagtgttttgtctgtggcttcctgtttaatttttgtaatggtgtcttttgcagagcaaaaatttcagattttgattaaaatcagtgttgatttttttttctttatatagttgatgttttttgtgttgtattcaagaaatctttgtcatgcaaaggtcacttaagattttctgtaagtttttggctgggcacagtggctcacgcctgtaattccagcaatttgggaggccgaggcaggcagatctcttgaggtcagcagttcgagacgagcctggtcaacagggtgaaaccgcatgtctactaaagatacaaaaattagctgggtgtgttggtgaattgcttgaactggggaggcagagactgcagtgagcctagatcacaccactgccctccagcctgggtgacagagcaagactctctctcaaaaaaaaaaaaaaaaaaa

SEQ ID NO: 58085 - DNA, 2445 bp, Homo Sapiens
ggtaagtgtctcgcagcagttccaccactacgggggcctgatttatggctagctctgggagactgtcctccacccagacccctgccaggttgagaaacaattccttatacattgcctcattttcctgctggcaaaatgcatctttacaaattttgcacctctcatagagtctccattcctctgttgtggggatggtaagggtcattatcatggcttctttgacctaggtttagagtcatttccccttctcaagtaaaggagatttgtgcttgcaatttctggagcaattatcttcctaacagaggaccagacaatttggcaaatataaaaaatcatgttggacttgctgtcctccaatcacacatcttttagatttgaagtaaggcctctttctattattcctgtagctccaattatattgaaataatttttagacagtgaaccaattgcttgagttactactgagtgctctgcaccagtatcaaccataaagtccattttctggccccctacctccattgagaccataggctcctccgggcctaatgaaatggagcctggtctatctcagtcctcataataatcattgattcctgccagtccaattaaatccatgtctgacttctgaaccccttgaccagcggcggtgggttctggccagccgttttttccctgattgttgcctctttccttttctctttctgggcattcgttcttacagtgtcccatctgcgtgcatcttgaacattgatctctctcaagcttaggttggcacccttgtcctggcttagcttcttggttttgcctagcttgtcctctactctgaccatgaccatgtcttctcacaaaacccgtttcttgtccaactaaggctgtctccagccagtctgccttttccttagctctgcatttagctttgctcctggcctcctcatcctgatttacaaacaccttagtagccaccaggacaggataagctgggtaatattcatgccttcaaaacattctaacttctgaagtttaccctttatgtctccttgttcctggcttacaaatgccacattaaccatacactaattacccgcagcctctgggtcaaatggaccgtccaggtcatgagcctgtttggtttatcaggccatgagcctattttgtgtatccccagttgtgtcacttaagactgtgtccgtggtgtgagccaggttaagtaaacttagagacctgagagcccatcttgaagagctgaggaagcagccaagaaactttatcaattctgttggattatcagagcacctaatatggtcagagaattaaaatttgtaagagtcatgtaataatagtgctgcagatcctgtaatgccaggtacagtttctgcttcatagctgtctggaggcgcagttttcagaaaccatagacatctgagaaatatgtttctggcttttatgctcaagcaaatttattaaagaccacaaggccacagcaatattcaataaatcatgacatgctttatttcatgtcatatttcaaaagcttcatgtagcagtaaacaataccacttacatttaattagttttattgaacataaagcaacttcatttgtaatgaaccacatgttaggattaaggatgtattttaatgacctttaagtaatgcgaccaagttgttgccctcgacctcacagcagaggctttcctatattattgaaaacttcagaatgatttttaagttaccatgaaaagcttcaaatgacattctccttattgtgtctttattcagtcatctgatgttgactatactagatgaaatgcattcctgtaaatgctgatgtgtgtatagaaatgagcttcttgccaacctgttcttaattttaatgtatcaaaagtagtttgatgtatgaaaatttcatgttttgaaaattaccatgacaatgtaatatttacattctcaaactcaccctattcctggaatcatctgagtacatatcagacattctactagaagtttcataattatcaggttattagagaatatttctttttgtgtaaactagcttgtgttgaaaatgaatttcgctgttaatagttaatacacagtttgagctacagtaacacttgcagtgcggtaaattagtatggtcaaccattagtccaccctttctgaagctgctcttctttagaaaagctgaggcaggtggattgcttgaggtcaggatttccagaccagcctgggcaacatggtgaaaccccatttctactaaaagtacaaaaattagccaggcatggtgctacacccctgtaatcccagctactcaggaggccgaggcacaagaatcacttgaactccagaggagaaggttgcagtgactcgagatcccgctactgcactccagcctgggtgaagaatgagactccatcccaaaaaaaaaaaaaaaaaaaaaaaaaaaa

SEQ ID NO: 58086 - DNA, 2419 bp, Homo Sapiens
attgtaggcacaagcaaaggtagccaggtcaccacatctagccaagactgtcagcctgaaaagtgctatattgagagcccttaacatgtatgggggacatatccaggatcttctcaaaacaagccctatcacagagctgctccacgatctaaaaggatcctgtaaataaatgggcaagaggctcttggaagtctcctttactgtcctggggttcacaggatagaagcacacgtctgacttaatctcaaaatcctcaatgctgccccataatggaagagtctgcttacctgtggccaccgtttcagcttttcttcctagatataagcaccaaggaaaatcaatgctggtacatagtaggcattccataaatatttctcgagtggatgagcacatgaatgaatatgaatatgcatgtataaaacatcattttcctcccacactggctgacttcatctgtataaacttattcttgcctgagagctggattccgggagaggctggcacatcccaacacacagcttgctctagcttgcgtggagcctggagggagggtgggaaatgcatgctttcattcttgctgtgccttaagaggagtcaagcccatgggccttgtgactataggcaaaagatgcccagttctgtgtcccggagctctgtcctgtatcctgggagctactgcagcaatctgggcagcatgactgacagcttcttcttgtgccctgtgcctctacaggccgcacccctccttgtccatgtcagttcctttgcagccaccagccataagaagaagctgtatgtgatcgggggagggcccaatgggaaactggccacagacaagactcagtgttatgacccttccaccaacaagtggagtttgaaggcggccatgcccgtggaggctaaatgcatcaatgcagtgagtttccgggaccgcatctatgtcgttggtgagtaatggcttcttattggtctgaatggcttagaacctgatgagcgcctggctgcagcacgtaaacggtgtgtcgcggtgtctccagcgctggcaactcactgcccctaggacccactctggctttcaggagagccatcaatcgactgtttctcttggcaagagggtagacttggcctaatcagaagttgaattttagtggttaagagggaagaaaccagaaaaatggagcgatgcccaccgtgtttcctccctctcctcaggtggggccatgagagcgctgtacgcctacagcccgctggaagacagctggtgcctggtgacccagctcagccacgagcgggccagctgcggtatcgcgccctgcaacaaccggctctacatcaccggcgggcgggacgagaagaacgaggttatcgccacggtgctgtgctgggaccccgaggcccagaaactgacagaggagtgcgtcctgccccggggcgtgtcgcaccacggcagcgtcaccatcagggagtcgtacacccacatccgcaggatcgtgcccggagcagtgtctgtctgacggcaggatggggagctggagagcccccccgaccctcagcgtacccgcctcacctctcaccctcctccagtcccacttcaggcagcaggctcgagtttgaggccatacatcaggggatcccctagactcactttgggggaaccttggaagtcacagtttggggtcacttgagaccggccaggaatgtttgcatgacctacctcaggaggggaggcgaggaagagtaatatttagcattcaggacccacccaccctatgccggcttctgtgccaggcacttccttttatcggttcatttaacctggtgactggctcttatcacttctagtttacaggtgagggaaccaagtttcacagaggctaagtggcgtgcccctgatcactcagatagcaagtagctaccccaggagtctaaaatccaggtctttcatctccgaagtcaatgctctttccaccatgctgcctatctcagagcaggaaaaacaaacaaaaaacaacaacaaaacctggctcgtgctgggcgtggcggctcacgcctgtaatcccagccctatgggaggctgaggcgggcggatgacctgaggtcaggagttcaagaccagcctggccaacatggtgagaccgccccgtctctactaaaaatacaaaaattggccgcgtgcggtggcaggcgcctgtagttccagctactcgggaggctgaggcaggaggatcacttgaacttgggaggtggaggttgcagtgagccgagatcgccacactgcactgcagcctgggaaacaaaagtgaagctctgtctccaaaacaaaaacaaaaacaaagaaacctggctcatttcttgtttcggcaagtctgctaaaagattcactcagcacagcagggaaataaaggtgtttcctgctttc

SEQ ID NO: 58087 - DNA, 418 bp, Homo Sapiens
tcaatgtctgacctgaaatgatcatgtagacaaggtacactgaagaaccctgtgacagacaactttgaaaagagtttaatgatgtttagcattttaatggaagtcctcatttgtattccagctcctggtaacgtttttatccatggatgacttgcttgggtaaggacatgaagatagttcctgtcataccttttaaaggtatatgttttattgatgttaacgttaattgattgagctactgttagtgatgattttaaaattaaagcagatgggaatctctctgagaaagaaaatggagattaatcttaaactgaaacagtagttgggaaatcttttagaaatccacctattactacctattggtaaaggagattaaatttctacaggtatggagagtcggcttgcctacactagtgga

SEQ ID NO: 58088 - DNA, 497 bp, Homo Sapiens
agcggccgcgcgtcctggatctccagcgtccccccggggagcacgcgcgcccggcccgcgctggtggccgtcaccggccggtgctggggggtcacccaggccacggtgggcgccggctcgccctcggcgcggcagaggaagcggacgtcttcgcccgcggtggccgtgacgcgctgcagccgccgctcccggatcttgggtttgcggcacacgaagtactcgaacagcacggagtccggcaggtttcgcagcgcgtcgccgcgcacctcggccggggtggcgcaggccggcaaccgtccgtcgaagttgagggtcttgcgacgctgcacgatccacagcatgcgacagtcgcaggccagcgggttcccgtgcacgcgcagcgtctttagcgtgttcaccgagtggaatgtgctcttctccaacgtgaagatcatgtttgtggatatgtagaacatgcagaacgtggccatgccattgaatgcctgctgctgtactgc

SEQ ID NO: 58089 - DNA, 1992 bp, Homo Sapiens
tggagcaggtgaagcggcgcccagcccacctcatggccctcctgcagcacgtggccctgcagtttgagccaggacccctggtgagggcagggctgggtgggcacagggaggggtggggctgggacaggcacagcttttagcgaattaaaccagcgagctagtgcctggagggtctggaaaagcagatctagaacacagagagccagatctagaaagagagaatgctttagacaagagccagaaagcatgccacgtgacctcaacaggcttacaagtgcccagggtagatctcagtgcgcagcgggcagggtacacacgtcaggaccccgcggagccacagagagtccagcagcctggcagaaaccacatcccatcccactctgtgcctgtggcagcgcccccatcagcctgtggcagcacctttccgtggactctaggggaccaaattcttctctccaaagcctttttggcagatgccagcacgcagtcattcacggttgatggttgggaaaaagaagctgttagccatcccaggtctagggagcacagcaggccctgatctggaaacaagaaaaccaccacacacagctcacaaggcagaccacacaattgtggatccagaagcctccggatgaggcagaagatacctgggagatgtggatggacaaccgtgccatccagaaacacccgcagagtctagaaaacccagcaggtgatttagaaagggagaggccacagtgctggctggcaggggatctgtagacaagggtctcatcccaagaagaccccgtccagcccagcacaggataggaggacagcctggggacagccagggcactgcaccatgtggacatgcatagtggacccctccagaaaacaaggaaaccgatagagtggggagaagtgcccgaggcatgcagaaagaagaacatgtcagctgcaagaccagaggctggtcatccggacgccaaaccatcagatatgcagaaaattaggaaattgcagtctttcccctgtctacattctctttccagaagagtggttcccccgacaaccacatgcacggagactctggccctctgagcaagggagtcccctattcaagccttggggtttctagaacaccagattgtggacatcagcccagggatcgtgctgactaccatgttcttttacagatgtggaaaccgaggcctagagagggtcagggacttgcctgaggtgaccccggcggcctctgggcattttgaggtttattctcgcatagctccctcacctcatcagcttgtggggagccgatcagagatagctgtggtcccctgggcagcttcctgttggcctgtcttagaattttgctatatttggggggtgtgaagagtggatatagatgtgttaaaactgtttaaagtggagaaggaggaccgggcctggtggttcatgactgtagtcccaacgctttgggaggctgaggcaggaggatagcttgagcctgggaggttgaggctgcagtgattgcaccactgcactccagcctgggcgacaagagtgaaaccctgtcttgaaaaaaaaaaaaaaagtggggccgggcatggtggctcacacctataatcccagaactttggaggcagaggtgggtagaacacttgagatcaagagtccgagaccagcgtggccaccatggtaaaaccccgtctctactaaaaatatgaaaattggccaggcgcagtgactcacgcatataatcccagcactttgggaggttgaggcaggtggatcacccgacgtcaggagttcaagaccagcctggccaacatggtgaaatcccgtctctactaaaatagaaaaattagccaggcacagtggtacacacctgtgattccagctactcgggaggctgaggcaggagactcacttgaacctgggaggtggtggttgcaatgagccgagattgcaccattgcactccagcctaggcaaaaaaaaaaaaaaaaaa

SEQ ID NO: 58090 - DNA, 1790 bp, Homo Sapiens; identical to SEQ ID NO: 26571

SEQ ID NO: 58091 - DNA, 767 bp, Homo Sapiens
catgatttccatttgtagaaattttccaaagtatgcttaatagattgttcatacaaatattgcttaaaagaaatgcattaagtagaaacctttttataaaaactaaagtttgctggaggtattctctctcctttccattctgtctcttaagccagcccaaagacatagtttctatagggttcttgtgtctgtagaaataggtatatgatttaacagctaaggagctagcaaatattaattctgtaagaccctgtgcctatttatgaagaaataatctttgacatgctaaattcccttttatattctaaaaaaaaaaaatttaatgaaacccttctttacaagggcctgatgtgaaattaagagtatgaatacctactagtattacaccaccaataaaatgggttttttaatatggatctctctgtcttgcctataaaaatattagcgttttctggctgtaatgtatcaatttttaaaaattctcttttaaacttattacaaattatagtacaaagagaactaatatcaaaaccctgaataagccttaacctttcaaagcttggttcattcgcttttaaaataaagaaaccaatttccctcctactttatacagttataaagacaaaaatgaatgttgttatagtaaaagctaaagtatgtctgatttttttatataaaggaaagtacagtcattcaatttctaattgaattgaatttatctaatgaagaaagtattttttaaaataatctttttatgtatctgtact

SEQ ID NO: 58092 - DNA, 1599 bp, Homo Sapiens
gcacgaggttagctttactcttaaacaagctattcccaaatatggccactgttagtttcatgctcatatcttacagcttagcaagtacagtggattggccagatatgagtcatgtgcccacccctggagcctacccaaacccaggaaccaagagggaggaactaagagtggttcccatgggaaaattgggaggcctccaatcaaaagaaggaggaaaggaaaagcaatcattgaccctcactccccattatagttcacttcatgcagccaggcaccacctaccataggctgctctgctccactcttgattttgacttttccctttctttcacttttatttttatttacttatctatttatttgagacagagtctcactctgtcacccaggctagagagcactctcggctcactgcagcctccgcctcccaggttcaagtgattcatgtgcttcagcctcctcagtagctgggattacaggcgtgtgctaccacagccggctaatttttatatttttagtagagatagggtttcaccatgttggccaggctggtctcaaactcctggcctcaagtgatcctcccgcctcagcctcccaaagtgctgggattacaggagtgagccaccatgcccggccttacttttattttatttatttttatttatttattttttctttgagacagtcttactgtcgcccaggctggagtacagtggtgtgatctcagctcactgcaacctccacctcccgggttcaagtgattctcctgcctcagcctcccgagtagctgggattacaggcacgtgccaccacacccggctaattttttatttttagtagagatggggttcaccatgttggccaggctggtctcgaactcctgacctcaggtgatccgcccgcctcggtcttccaaagtgctgggattacaggcatgaaccaccgcgcctggccttacttttaattttaattacgtaaatcaggacttcatctttatataatgttcacatattacaaaggtacatttcagcctactccctccctttcttgtcatttttttttaatgaaaaaaagttgttttttttttttatgagagatgaggtcttactgtatggcccaggctggacttgagctcctggtctcaagccatcctcctacctcagcctcccgagtcgctgggcctttctttctatttaaatttatatttacagggttttgttttgtttgttttttaatcatcaatcaaattttaatgtccatttatttatactttgtgtctttcctggagagctgttcacaagagtatggaggccttccttattcagtgtgactggtgcctggtgttcctagtgtggagatactatgatttgttatctacagtgattaaatctagattgtttccagtttttcactattgaaagttgtgacctgaagctggttgtggcaatgtgtgcctgtagtcccagctacatgagaggctaaggtgggaggattgcttgagctcaggaaatcaaggctgcagtgagccatgatcatgccactgcactccagcctgggcaacagagtgagacttcgtatctaaaaaaagaaaaaaaaaaa

SEQ ID NO: 58093 - DNA, 1733 bp, Homo Sapiens
agaggcgctgctgctgccgcgggagctggggcccagcatggccccggaggaccattaccgccggcttgtgtcagcactgagcgaggccagcacctttgaggaccctcagcgcctctaccacctgggcctccccagccacggtgaggacccaccctggcatgatccccctcatcacctccccagccacgatctcctgagggtccggcaggaggtggcggctgcagctctgaggggccccagtggcctggaagcccacctgccctcctccacggcaggtcagcgtcggaagcagggcctggctcagcaccgggagggcgccgccccagctgccgccccgtccttctcggagagggagctgcctcagccgccccccttgctgtcgccgcagaatgcccctcacgtcgccctgggcccccatctcaggccccccttcctgggggtgccctcggctctgtgccagaccccaggctacggcttcctgccccccgcgcaggcggagatgtttgcccggcagcaggagctcctgcggaagcagaacctggcccggctggagctgcccgccgacctcctgcggcagaaggagctggagagcgcgcgcccacagctgctggcgcccgagaccgccctgcgccccaacgacggcgccgaggagctgcagcggcgcggggccctgctggtgctgaaccacggcgcggcgccactgctggccctgcccccccaggggcccccgggctccggaccccccaccccgtcccgggactctgcccggcgagccccccggaaggggggtcccggccctgcctcagcgcggcccagcgagtccaaggagatgacgggggctaggctctgggcacaagatggctcggaagacgagccccccaaagactcggacggagaggaccccgagacggcagctgttgggtgcagggggcccactccgggccaagctccagctggaggggccggcgccgaggggaaggggcttttcccagggtccacactgcccctgggcttcccttatgccgtcagcccctacttccacacaggcgcggtagggggactctccatggatggggaggaggccccagcccctgaggacgtcaccaagtggaccgtggatgacgtctgcagcttcgtggggggcctgtctggctgtggagagtacactcgggtcttcagggagcaggggatcgacggggagaccctgccactgctgacggaggagcacctgctgaccaacatggggctgaagctggggcccgccctcaagatccgggcccaggtgagacgctggggagtgaggtcagggtctccagaccacagctgggcagaaagctctgggtgggtgtgcgacagcccccaccaggccatctctctgcaggtggccaggcgcctgggccgagttttctacgtggccagcttccccgtggctctgccactgcagccaccaaccctgcgggccccggagcgagaactcggcacaggagagcagcccttgtcccccacgacggccacgtccccctatggagggggccacgcccttgccggtcaaacttcacccaagcaggagaatgggaccttggctctacttccaggggcccccgacccttcccagcctctgtgttgaggttgccgggggtaggggtggggccacacaaatctccaggagccaccactcaacacaatggccctgcctcccaccgctttatttctttcggtttcggatgcaaaac

SEQ ID NO: 58094 - DNA, 1630 bp, Homo Sapiens
gtaggttgggagtggaaggtggtggctgctgctccgcagtgtggggaagatggcgccgccggtggcagagagggggctaaagagcgtcgtgtggcagagtgagtgcggtggggtaggggttgagagagggaaggccgggaggctgccgtgccgggcctcgttttgcagccccaacctagcggtctgttgaggagccgccgcgagcacttgttgctttgggacctgtgtgaggacttcttcctgctttcctgccctgccttattccttgccagcaccagggatgggcggggtgcgacgggacgcggccttctcgttggcgtcgggcaccccctcgcctcggccgcgctctggccgcgaagctccgccccgggtgagccgcccggcccggctttccctcccgcggagcccgtgcgtgccctcggccgcgctccccactcttctccgctcccgtccgcgctccccactcttctccgctcccgtccgcgctccaccagttggggatgtctctccatccgagacaatccgggcgctgtttattccgcccccatctccaccccacactggagtttgcaaggactgtttattctgcttattcgtgttagtatcaacccgtgcttttcaaaaaacctcactgtttaacagactcatcttcccctattccgagaggagcctactttctgaaaagttcttgagaagagaccattggaatgaccggtgtccagccgtgacatcttcctgcatagcctgggcaagagccgctccttccgttttccctactctcgggggcccctccctgctgttaggaccggactccttattggttactgatgttctgcggtatcatccacaactttcataaacatcgctccaaacctaggtctggcaggttagagaaagaatgaaaccacccaacaggaataaccatcattctttggtatctctgagttcaagataattatggcctagtagtggaaagggagtagcatctaattagtatttcttagtccaacttgttgaacaaaaaacaaatgatttagtcagcagaattctgggagttagagttccttgtctaaaattaaaaatccaaatcagtaactgggatagtgcttaacatatagcaggcactaagcaaatgtataaataggtgaaaaatatgaaattatcttttaaaagattagataattttaaggttggcatttgctttttcaagatttacatggctgacttaagatttgagatgttttaaaacaatggtatttaaatacatttatgtgaaaatgggtaacaaattgtgttgtataatttccaagatatatatgtgattaacatccgcatgtatgtatttaagccagttctttacatattgaatcataagcttttccctttttcacattttccttctgatcctcatacagataaagacattgtttttattatctgtcattctgtgacttccttttttttaaacaactgacattgactcaacatttttcatgttgcttcacaatctcgtaattaacattttaaattgctttttaaataccttgaggtggcaaaaaattttgatagcaaaaaaaaaaaaaaaaaaaaaaaaaaaaaaaaaaaaaaaaaaaaaaaaaaaaaaaaaaaa

SEQ ID NO: 58095 - DNA, 1615 bp, Homo Sapiens
ggcacgaggctttccatagtggagcctgggctactctgaaatagaagcacctctccttcctttggacccctggagcactgtgttctacagttcttagctctttttctgtgtgcattatttgtatgtcttatccttggtggtcaaccacttcaaggtgagagactggggtggtggttccttttttttattttttaatctcccctgccccatctttctctttcccacttcctatgttgactgacaaaatcttcgtatttcccagagtaccagagtttttctgtgagaggctaggtcagtgtttctccccaagcagaggctaagaagtacctgatgcagtcatttattttcagaatgtgtgtagcttgcctccagcggattgcctgggaagctggagatgtgcttcaggggaaaggtggtccatccacttttcctgaacaggctgtgcatgcagccttgacatagccaactctgcaggagcatgaaagaactgaagatacagtattcgacttccagtatttctaatcactttagagacaggatgacgattggtttagaagagccaggggatgactaaggagcacatgtaaaacaataatgttcagtatagactttagtttctgatttgaaacattttctaaaaaatcatgtatctttaaaaaattggaagcagctcagtgtttgctggagatgaggcatagagtgtggtggaagggagggatgacaaaggggcaggcagagactttgagggatgaggggtgtgcacatcaccttgctggtggggactgtttcatggttggatacatgtgtgaaagcatatcaaattgcatgctttaaatatgtgcagtttcctgtgtatcaagtatacctcaataaagtagttaaaaatggtatacctttattatgctgaaagaagggaaaatttggaaaggagatgtttttctgtagaagatagcttctagaaaggaaaatcaaacacagtctaagttattctctgttttgttctcctccctccacagatgtcttgttgttttgggtcctcttatctaaaatttcacaatatgtgaaagtagcctgaactctaaaggtagtagttgtggttttgggaaactgtgtgttcgtactgcctctgtaaatggaacacaagcctctcctaccctctggggagcttgtcacttagtacagttttttaggaactcctaagaagtttaagttctggccacaggtcccagagttaaggatgttgtcaactctgctactcatttgaaaaatgtcttgtggaacctatagccgcagaaagagctttgtttctctgggtgaaaacaacatacattatcatttctaataactttaatggatgctgctgctttcttctttttggcccccaagatactcagagataaacttgaaactcaactataggtggggggagggggaagggatagctttaggaaatatacctaatgctaaatgacgagttaatgggtgtagcacaccagcatggcacatgtatacatatgtaactaacctgcacattgtgcacatgtaccctaaaacttaaagtattatgataataataaaaaaaaaagaaactcaaaaaaaaaaaaaaaaaaaaaaa

SEQ ID NO: 58096 - DNA, 1496 bp, Homo Sapiens
gctttgtcccttaagcttaggtggttgctcttttcctgatgagtctactttatcctaaagttagtaaacttgctttgccactggccctttcaaactaggggtgataaaaatcactctaaccaaaggttactgcagtctcttgtgttctttctcatcccttcaacagctttgcaaagagtctccaaatcctctctgcattatgcttattaaattgcactatcagtttctttatatgaccccaacaaatatatgaatctcctagttagggaaactgatagactaagagtacttttctttcatgttcaaagctagaaggtaaatattttctaataatgtgaagcagttgaaatgacaatttgggttagagctgtgctgtggactacagctatttgaaagtacagttttatttttatgacagtttgctctctgctctctgggatatttacattttcctttcctatggagaaggtcagagtatgattgattcaacattaaaaataactttaggttgtttaaagtgaggatgttctaaatgataatatttgtgaagtcctctattttgatatttttcacttaagatcagtgatttagaaatcaagtgaaaatcttgttaccatttgaatgaacatactgatattaataaaatgataagtattttacatgatcatccaagttagattttgacagaatgcctagggtcttggagtaaccagcttttggcagttcctggctctctttttcatattcaaatttgtaaagaaagcagaggagagtaaatgtgtgtaggtgtcttcctcctggaagtaggcacaaactgcatggaaaaccaaccaaaaaatggtaacagaaaaatatgataataatttatttaaaaataaaattcttagactttgtcataactagaagactatctagaattgtgaatgaagtaaggaccccaaataaagacgcatttctaattctcatatttctggcccatgcagcaaatattgggtatgctagatggaagaaaaggtgttcaatatataacatcctcttccatatctcagttttgattctattaaaattaatacaaggaatatagcagaatactgagaaacaaacacatttagtctgatataggggatgcagatgaatttgatttatattcatggcagttgagccttctaatattgaattccagagttagtgcggaagcaaagaatgtgtgctttctgtgagtgattcctaaataaaaagaacagagacatatgtttttaacaagtacttatgtgggattcataaaattaatttttatattatcctctcccctatcaacaaattgttagggacaccatgtccgtgttttaaatgtttattaaaattgcgttgtattttaatctcaacaatatcaatatagatttaatcctcagtcatgtgtgtcaacttttgtgaaaattaattttattttctttcactggcataagtttaatagttattgaaaaaaaaaaaaaaaa

SEQ ID NO: 58097 - DNA, 1487 bp, Homo Sapiens
gttttaaaatgggttccaaagcggcgcgctctgtcggcccagcgggcttgcggcaccagaggtggtctgcagccgcgcaaggattcccacggtcgttctgggctggtgcagaagctggtgctcccgcacccagcggccagcaggctcggcgcagcacatctccccaccccacccccacacacccccgtggggtgcgtcgatcctgtagctcagagggagaagctacttagaacttcgtgaagcacagaggatctggagcgagccccgcagctgggatcagtggtcttaagttgaacccgcttacaggaagatgcagcccagctcacagcgaagtgtgggggggccgtctctaaagccgagaagggaaccgctttagaagtgggggtggggggaagaaagaatgaatgaatgaatgaatgaatgaatagaaagaagaaggaatattaaagatcggagaggaagttcaagagagaaaagagttttctctttcctttctgttcctggtgacttgggccctcaatctcgatgaagataacacgaggagtgcacaggcaagtgcccagttgccagcaattgcttcaaaagcccatgttcttcttttcccccattcttaggcacagccaaaattggtcagaaaggggagtaaagtgggacacgagcttcaaagtagggaaaccaaagaagggagcatccacgtcctccctctccagcttctcccccgcgttcttcgggcgaatccgagggacgggcgctgcgctggggaaagtttgtcccacccgcgtttcgcagctggttgcaaggagaggaggaggagagggagggtcaagctcggagcctgtgaccgcacggatgatcgagccggcgtcgcgcttacctcgcagtcctcgtacttgatattatccgtcaatttccaaagcattttcatggatcggcgtgaacggatatgcccctctcggtctcgcacccaagtggagctactctctggctctttaccaacagcctaatcgcctcattagcatatcaacaatagtccaattgctcgccagtaccacaatctgccgccggccgctccgacacagagatgccttctgcaaagcccggcactgctcaaggtccaagcgccacgcctggggcccagcttctagcacttctcccttaaccctgctaccacgatccgagctgcccttttggccccgtgcaattttattagaaatcattatccctttcgcaattaaacataaccaccaaaccaagaccggcgaagtcactccaggattttttcccaacaagggatcgcctccgctcgaggcagccaacccctcgggccgcagcgccttgggagttttattggctttgagctttcccccaggttggagattctgccaagcggctccggtggctctgctggggtttgcaatcccttattgcagcgtgtaaaataaaagttgtaccctgaagaggttacttgacagctccaggggttaaac

SEQ ID NO: 58098 - DNA, 699 bp, Homo Sapiens
  misc_feature (597)..(597): n is a, c, g, or t
ttttttttttttttttttaaattcagagcttttcatttttaggtgtgccattctgtaagtaacgaaatacatgaagaatattcaatatctattccttacaatgtttctacttctatgggtgcttcctaaaggacctctttcaatgggacctttgagagggcattctgtgtgagccacagtccattctttattcccactactcttgtcccactgtgtggatgctggtgggttcttttaaaaattcaccagcaatgcacagccattttactcttagctgtatgttctggtgccccatcagggtgtctggctcccagctgtatgttctggtgccatcaaaaggtgtctgggtcccagcccaccagtctattgaaagtgcaaacagctggggcagtctgctaagctctgggtccaggtcaaaaggccttagaagctgacccatgttctgtctgtatccagttatcatgaagtgaacgggtgactgcaaacattctggaggagctttgtggaggcaacagcaggccagcagaacgtgttaaaacatgggggctaactctgcagccttcccactgtccttatctacatagctggctatttcanaagcaaagtataataatgccctccaaagaataattatcccaagaacttagggtgttaaatgtgtcataggagaaggatggtcagtttatggtttatctacct

SEQ ID NO: 58099 - DNA, 462 bp, Homo Sapiens
ttttttttttttttttttttaaagtattaacatgtttaatttttacagatattttatatgctttcagatattcctcaggaagtcgagacatgctgtcctatgtaattttagatttactagtagccacattaaacaatggcaaaatgaggataattaatttttcaatatattttaacacaatgtcaaaaatatttcaacatgcaatcaatatgaaaaaaattgagatattttaacatttttctttccatactgagtcttcaaaatccagtgtgaattttatatttatagatctcaattcagactagccacatttcaagtgctcaatagccactggtggctaaaagttactgtattggacaacacacatctagagtctaacccccttctatctccagtataatcaccttaaaatgtacaaagtatataaaaggtaacccaaaattaagtagtgctctgttaaaa

SEQ ID NO: 58100 - DNA, 3360 bp, Homo Sapiens
gtcaaaggttacaaaggcaaagccccttttcttggcactgcctcagtgagtcatgatttgagtcacttcaatttttccatactgttcaaaataatctcttaggtgttgttcttcattgtttaatgccaccaacaaatatctttttcatagttaagtgggcacctggtctttgagaatcttctcttgagacagctctctttggttccacaactcttccatccaccttatgtggccttgcattcatggctgcatccacctcctccacagtggcatgtgtgatgaacccaaagcccctggagtgctctgtgtttggatctctcattaccacacagtccgtgagcgttccccattgctcaaaatggctcctcaggctctcatcggttgttttaaagctcaaccctccaatgaagagcttcctcagctgttcgggctctttaggagactctgacttagacatgacggaagggagaagagagactttaacgatgcttcttcagtggcgtccgcgggcagaaaagaacaagctgatgaacgtgtctcactgtattcttacgataaagtaagatagagaaaagaaaatattaagaaaatcatgtggcttatgcagaaaaatgaaactggattccctacctttcaccatataaaaaatttagctcaaaatagattaaagatttaaatgtaagaccttaaactataagaattttagaagaaaacctaggaaacatcattctggacattagtgtcgggagagaatttataactaagtcctcaaaagcaattgcaacaaaatcaaaaattgacaagccggactaattaaagagcctctgcacagtgaaagaaactatcgacagagttaagagatagcctgcagaatgggagaaaatatttgcaaactgtgcagccaagtttgcagatatcaaaggtctaatatccagaatctgtaagaaacttaaacaattgaacaagcaaaaagccccattaaaaaatggtcaaaagacacgaacagacacttctcagaagacatacaagtggccaagaaacgtgacaaaatggtccatatctctaatcatcagagaaatgcaaatcaaaaccgcaatgagataccatctcacaccagttagaatggctgttattaaaatattaaaaaacaaatgttggtgaggctgcagagaaaagagaatgcttatacattgttggtgggaatgtaaattagttcagccactgtggaaagcagtttcgagatttaaagaacttaaaacaggactaccattcaacccagtaatccattactgagtatatatctgaacaaaacaaactgttctaccaaaaagacatgcgcatttgtatgttcattacagcactattcacaatagcaaataaatggaatcggactatgtgcccatcaatggtggattggataaaaaaaagaaatggtacatatataccacagaataccacacaggcataaaaataacaaaatcatattctttgtagcaatactgatgcagctagaggctattatcccaagcaaattaacacaggaacagaaaaccagatactgcttgttctcacttataaatgggagctaaacattgggtactcatggacataaagatggcaacaacagaaactggagactactagaatgagaagggaagggggtgggcagtggttgaaaatccgactgttgggtactatacttagtacctgggtgacaagatcatttgtaccccaaagctcagcatcatgcaatatacccaggtaacaaacctgcacatacaccctctgaatctaaaataaaagtggaaaaaaaaaaaagatgccaggtacggtgactcatgcctgtaatcctgcactttgggaggccgaggcgggcagatcacctgaggtcaggagtttgagaccagcctggccaacgtgatgaaaccatgtttctactaaaaatacaaaaattagccagtcatggtggcacgtgactgtaatcccagctactcaggaggctgaggcaggagaatcacttgaacttctgggctcaagcattcctcccacctcagcctcttgagtagctgagattataggcatgtgccaccgtgtccagctagttctgattgtttttttttttcaaatttgatctttctttttcttagttccttgttctttgttttaattttcaagcttcccttttatttattaaaacattcaaatataattattctatattttctgtctggtaatgtttatagcattatagtatttgaaactttataggtttgactctgttgccagttctttctgttggatgtcactcgtaatggcttgtggctttttctcttgtgtattttgtgaatttttttcgattgtgaatttatgttccttggaacttttctagtggaaactctttgtgggctatgtcgatgttcttgcagcgaggatttgctcagcattatgtattacatatatgttattacagccgacacttgaacaacacaggtttgaactgcgcaggtccacttgtatgtgaattttcttccacctctgccacctctgagacagcaagacccattccacttctttctcttgcttttcagcctactcagagacaacaaggatgaaaaactttgtcatgatccacttccacttagtggatgggaacattagagaggtgccgttaactggggaacattagagaggtgctgttaactggggactgccgtaaattaagttctgagcttgaaattcttcagattatacaatagcatacattctgactgctaatctaattgagggctattagtggttatggattctcaggggaaattgttttttccatatgacaccaatactaaggtacagacaaggtcttggttggtctctgtctctgtctctctgaggtttgtttcctttttacctttacattgactttggcttcctactttggacaagctgtaggttttaacattgtgcctttaacagcttctaagttaaattggaaatatcatggtctccaggacattaaagaaatattcagggtgaaagctaactttggttctatttatataatattttatattttatagcgtgtagttgacccttgaacaatttgagtgccaacctcctgtgcagctgaaattcatgtataacttttgactccccaaaaatttaactactaatagcctattgttgaccagaagccttacctataatataaacagttgattcacacatattttgcatgttatatatatattatatacagtattcttttttctttgcacattaaaaaaagacatttattctgcatcatgatcagacttacatttagcaatcaacagcatgtttgcagaaaaaaaaaaaaaaaaa

SEQ ID NO: 58101 - DNA, 2829 bp, Homo Sapiens
agcggtttttgatgcaggaatacagctatctaggaacaaaagggagatgagactacagaacagactgtgaaatttcttaaaattattaaatgatcctaagactgagcacaggagtggatgatgttactgcagattgttcttaataagggctttaaaagcttaatgatttattgattggctctgcattaatgacgtgcccttgattatgcatgtgtaaataagagggctgatttatgagggtacaattgtatctttcagatatatttgtccaagtctacatctttaaaataaatggaagcaattatctgaatatttcaagggagggaaccccaccttcccatcccccacccccgatttgagggaagtctagtatgttaggtgaagagaaaaaaaaaagaaaagaggaagctctaaagggagttaggaacaaaacaaaacttccgttaagaaatatccctgcttctcttatcctaagagaagaaaaacagattcccaggtgccaccggggagcaatgttttacttaaaaaaaaaaaagaaaaaggaaaaagaaaaacctgtaagaagttgtcctgttaaatcaacgacacatggagtctgaaggaaatcagccttttcgttacaaacaggtttaaaaagccatggagaagagagacgtgaacagaagcaatattatccactaacaacctaactcccgcttagacatcagctgagagatcagcagcatcattgaacaggggggtttgtcttaagataatgactcatcttgatttctttcaggatataaaacttgtatttaaatcaattcagagaagcacttgagctttaaacattagagagcagggagagcctatttaataaacagcattatttcattttcaaagaatgatactggcagtagctctaagtttaaattttgtattattttcctcaattataattatagatgggtctgaaaggaagcatgcttattactgtcatatttattcttttgacaggtgttatgggactgtaatttggtgaaatgattcaaaacgcagattcctatccaaacacaattcttgtcatcaacacgagaggttcaggaaaagtcctccagcaagcctttcagagatcttgaacaccccatattcatagcacaatccatattcaggaataaggaggagagagtgcctttagggcttatatccggcgtagcaacagccagaaggcagagtgggtgtttgaggtaacaggtaacgaaggctgttagtggggacagctttcaactgggtggggtcggatctaggaagaggcacccagtaggaccccgagtcccgcgcgcggccggcagagggcgctgggctcaccgtcgccgggcaggggcggtgccgctcagtccccggggcgcaggcgcactcgtcgccgcggcggcgtccggggctggcgttaccctggaggctggtgagccgcgctgcgcaggccgaggccgagggcgggggcgcgggggcagcggcggccggagccactgggtggcgggggcgggctagggatgtggaggcctcgggtgtcctcggatctattgaagacctaggggcgacccgcgccggcaccttttcccttgcggtctgcgctcttccaccggagagctgagtgcaccggagcgcggcgcccgggcttgacgcaggcctggccgggcggcctcggaggagcaggaaaggcctgcagcgcgagctagggacgcgaggtccggggcagcccggaggccagcctctcagaggctcacgggcctggccacttttaaaaggagaatgtcccctccaccgtccctctgcccgcggcacccggtggccggagcaaccttgtcgtgatgatttatgcttctgcgtaagagcaagttgctccgtggccaaaaccctttcgctcctaggattgatcctttttgtggttattgttttaaaaagttttattgagatataattcacgaagcatacagttcacccatctaaagtgcacaattcagtgtcttttagtgtgtttgcagagttgtgcagctgtcaccataatgttttagaacattaccccccaaaagaaacacctcctttagctgtcactcccccctcccatctactcccattctcccagccctaggcaaccaccaatgtacttctgtctctgtacttttgcctattctggatgtttcgtataaatggaatcatacattaagtagccccttgtgactgggtttgttcacttagcgtaatgttttctgggttcacctgccataggttcttgacttcaggacagtttcctgctggctttagtttcctctggtaacttgggaatcaattgacatctatggaacttctgttatggttcaggtactataaactgtggaggagtgactaataaccgtatatatatttttcttactaatttcccttcatttcacaggtgttgaactaatacagtatagtttcttgttcttcagaagcttacagtcagcaaggagcagaaagccaaataaagtaggaaagggtaagatgttcaacgctgggcgcagtggctcatgcccataatctcagcaccgtaggaggctgaggaaagagggtcacttgagcctagaattttgagaccagcctgggcaacatagtaagacttcgtttctataaataattaaaaaaattagccagacgtggtggcgtgtgcctgtgatcccggccacttgagaggctgaggtagaatcgtttgagcccgggcagttgtgactgcagtgatccctgatcatgctactgtactccagcctgggtgacagagtgagaccctgtctcaggacaaaaaaaaaaaaaaaa

SEQ ID NO: 58102 - DNA, 2720 bp, Homo Sapiens
cagagccacttgtccctgttaatcacgaagactggaaaacaagcagagctatgtgacggatatattcaccagaccctatctctgtgggaggcggtgttttggcacagacaggctgatgatttcagggtcaagagggaagtgattaatcaaactgggaagaagacagaggaaaatccagcaaacagctatgaagaacatataaaaacaacaaccacccaatatctgtatgggtaaacaacgctccgtttgcacactggagaatgcaatgaagtgtgaccaggatgaagccgaaaacaaagaaatgatgcttccaactgcggctcccaggcatggcttttctttctgcaccttggagactcctctgcagctccattctcatcccacacctccagggtctgtgcacaccaaggcaggtggaaggggaggcaaggaactgagcaatctgaggttaggtgggggaaaggaaacacaccttctactattagtgcaaaacgagaattttcccagttaccgatcttgaaataaattcatcagatgatagcgttctccttcttcttttgccccttcttttgctcacacatcctaccttaatttgaaacattgcaatgaaagagaaatgtaaaaagcaaatctagaccaagctgcgttcaaatgtgcatgtagccagaaaccttaaaagtagaaggtgatcattttgttttgtttgaattttttaaaaagtataacatctgtcaggtactgactgtgaattctacatcttgtactgagtcgcccctctcttctatggaacattagaaagcaagaggaactaccatttgtgatagacgaagacagatttgcaggtggagggagtgacaagacctgatttgttttctgcacataatgagtaatccttcagacacagagatcctcatctgcagcacgagagaaaaggtaaaccaagtccccaggctcagcacccatggaaaggagcagagggagagagtcctctgagttggcacacgagttctgcaccgggctgtcctttgatatgacagctctcttctgtggtggggccacctaagaagtgcttgggaaaatatcttgataggagaactagacggaaacatgctttcagagaagggatgtgtcttgttgcttattgtggtttttcaatacatgagcctagtttacatagcaggggcccaaatgcagctctgtataatattgtcatacttcagctatgtgcgtgtttatcatttctttaccaacaacagctggagaaaatggctgagattggagaggagggagcagaggtagagaggaagtcaaaaccttggaatggatgacataccacttccccaatgaatgaagctgcagattcagccacatgtagttgatgtcgccatgtcaagactgcatttttccttccaaacacagaagtatggggtaaacttaatgcaggactatgaagatgaagccattgaggcccaagactttatcttgatttcttcaattccttggatatgtttactccctccccacactgggcccttgtagctgcttagactgaacctactggcccttctcttgctggaaagttgccctccaagaagtgcaagagctcagattgcacctgctaactgttaagaccagacttggccaggctaccagatctttctgcaacaaggccagcttcacactgcctgagcagacctttctgttctgccaaaggcagctgaagcagggaaaatggatcagcaaagggatctgggccaggcgcagtggctcatttctctaacctcagcactttgagaggccaaggtgggaggatcacttgaggccaggagttcaagaccagcctgggcaacaaaatgagaccgcatttctacaaaacaataaggttaaaaaaaattaatcaggtgtggtggcaactgtggtgccaactcttgagacactaaatcgggaggatcacttgagcccaggagatggaggctggagtgagctatgatagcaccactgtattccagcctggaagatagagtgagaccctgtctcaaaaaaagtaaataaaggaatctgaacttgaagaatgggccaaaaaagagtgatacttgactgcggttcctctttgcctgtgccgtcacctgggattggaattctgcatttcccacccccaattcccttctccagtcatctaactcctctgcttcctccaatactcagctaaggcattacctcctcctagaagccttccctgaaatcctcaagcagttctctttctttgacttccctctttggagcctcaactgtctctttgggtttgtctgtcctgctagactgaacgtaaataactaatgagggtatctgcatggaaagaaacagacccttctaagtgctgtgttaagtaacttcactgaaccagatgagagcattagagcagctgctttctagggttttgccagctcctgtatgcggacgtgaggctgctggggatgttgctattagtgataaagttaagggtccaagaggttctttgcttcacgactacgtcattggaggctgataagccatggccaagtgtgttcaaggtctccagctgtcataaaagtgtctgcttgtttattttaggtagataagtgttgctattattcctgggatggtaggaaaagccgggggcaagaaatcactctgtgaagatatattgagatccctggaacatttaaaaaaaaaaaaaaaaa

SEQ ID NO: 58103 - DNA, 2311 bp, Homo Sapiens
tgttgtctttttcattacagccattctagtgggtgggaattggtatctcattgtggttttaatttccctggtaactaataatgttgaccgtcttttcatgtgcttcatgacttctgttgagaaatgtctattcaagtccattgcctatttttttattggattgtcttttattattaagtccctgcaatgcaatgaattgtgaaatttatattctctgaggaagctgaaacattgtcagataaatgatttgcaagtattttcttccttctctggattgtctcttcactttcatgatgatttcctttgaagaacgaacatttttaattttgaagtctaacgtgtttttttcttttattgcttgtttttgatgtcttatccattccctgacctaaaatcacaaagatttacacctgtatgttcttctgacggtgttgtagttttagctcttacattttggtctttgatcctttttgagttaatttttgtagattgtatgagttaggcatcctcatattcttggcacccttgttgaaaattagttgaccgtacacgtaacactctgggtctgcccttatgcaatatggtcttgattactgtagctttgcagtatggggtgtgtggatttattaatagcagatgggagtagaaccgcagccttgttaagcagggataatgggaaggaatcagtctatcctggatatagaataattcccctttatttgtgtctctttgaaatgcattgtcgtagccccagttatttctttgttcagactcccagtgattttaagtgctcttcaggtttgagaaaggactccaacctgacttcactaccgtaacggtatgtgttatatcatcatcttcaggctcaccgtatttcaggtagcagatttcaggtgttgatttgatgttgatttgtgagttggctttggtggcagttttcagatagcatctctctctttgttgatggtcacacagcctacttctcagtttcagcttcccctggaggatgtacatttcataattcattgtatgaaaatctttacaatgggcaaggcatggtggatcacgcctgtaatcccagcactttgggaggcctaggcaggcggatcacttgaggtcgggagctcgagaccagcctgaccaacatggagaaaccccgtctctactgaagatgcaaaattggctgggcgtggtggcgcatgcctttaatcccagctactccagaggctgaggcaggataatcgcttgaacctggaggcggaggttgtggtgagccaaggccttaccattgcactccagcctggcaacaagagcaaaactctgtctcaaattaaaaaaaagaaaagaaaagaaaatctttacaatgaaatcccttagttctttctgttaaagtgagcccaagaaccttctaacttaatatatatgtgaaaataaaggtgagtgttctgctagactaacctgaaatactctaaacttggtggtttttacacagtacagtcacagaagatagagcaataattttacctgcatgaattaaatcttaagattatatattactttttcttcctgaatgtataaatcatccagtcttgattaatgtagaagctaatagttatgtaagtcttgaggataaactcatttctcctctgtttattgacatattgcttataattgaaattattctgaagatgatgtcattgtacagttctgtactttggaatatgtatatatttacagaagatccagggaagagaatttgtgattttaaacctttctcccacaaatgaagtttatgtaagttatatcttattaaggctgtttaaaataataaagtttagaccaataacaaaactaagagtaatttgaggatggtagttaacttagtttcacatatttaagacttcccttacattactctctgtgtggaaattcctaaggggttactaacttccaaaacatatctgatgaccatctgattacagagttaaactttgtgctaatgtgctaaccattgctcggatctaagtaagtgtcatagtacagcagctgatagtgtggcacctgaacattacatcttcaagagaagaaaactgtatattgattgattgtgatatttattgggtcataatgtatttaaattttctttaatgcatatgttagtgattgtttactgtgataaagtgcaaagaggtcttcaagagtgatcctgcagaggaagaattacctcatgtcactggtcacttctcaattaaaagttccattagcaaatgaaaaaaaaaaaaaaaaaaaaaaaaaaaaaaaaaaaaaaaaa

SEQ ID NO: 58104 - DNA, 2314 bp, Homo Sapiens
acatagcaagactccatctcaaaataaagtaaaaataaaaagttcactgatttattttaaattttttattctgtctttcagtgtatttgtcactaaattagctcttattctttggggctggatgatgtatcgtgagttcgaagggaaattggaaattggagctggagagttgtcttaatatattttatgctaagcttcacatgtcttttcaaattaatattctgcactctatgaattaaattctgtgtaggctgcctcattttctcagtctttaatcttctattgggttacaggttagatctgagggggacattgcaatagagaattatcttacgtttcaagataacattatatatatttttttttactgaaacactttttagacctttatgaataataatcagaaacttagttgtcatttgtaaacagaggttagagtggagaatgcccaaattaagatttatttattcagtgattagactatgaattagagtataaagtagactatgaattagagtgtgaagatttagaggtatgtgcagtgcaattctgactacttggagttagtgcaaatttcacagttgtctagatgccctccagaacattcccctcaatgcagacaccaactccaagctccagggttggcagggcacccacacttccgaccaacagtctatagattctgaggtcctactattttctcagactttataattgactaaggttttataaatgactagtagatctcaagaaagtgctatacttactagttttttttataaaggatacaaatgaacagatgcatagagcaaaatctgggcaggtcccacacaaatcttccctgtcctcaggatgcattacctgcacattagcgtatatcaccaatcaggaagctcaccagaactccagatgtcgatgatttttgttggggattcattatgttgacaagattgaatcactggacatgtcactgaattcagtcagcaactctcctgccctcccaggagggcttgctcaaaaccccaaccctttagtctttgtttgatcttttgtggcctggttagtcaccatcttgagacatctcattaccaagaactcaggtgtgatcctagggacccaccttgagtaacaaacacatttctttcactgggtaaattccaaggatgtataggatgtataggttacttcccaggaaccaggagcaaaggccagttaaattctttattatacagaagcaattttaaaatgttactgaaaaaccatagaaaaaagtccaatttccaaatccttacatgccaacaagggcagcattgttggtgatcccccagctcctcacctcaaggcaagctgtcatttcctgtatgtcttccttctcatcatcagatttcacagccaggttactgattcataggggtatgtcgagggcttttgtctggaattccctgcttaccagtagatgattggtttacatattttaagagcccttaaatagccctggaagttctatatttcaggtagtgacttgtcaggaggatcaatatgaaggacggcctaaacatctccctgcaaatgctttagcagcatctccctcccctcacccctggggagaaaggattgttcacacaggataatttgaaagtgagtgactatatatggtactgatggtgtttcttcaaggctgccagctcttgtgtttttagttcttttggaaatatttctagacttggtaagtatcttaagtatccactagtcccttgtacaatctctgtgtagagattcctgttttgtgttataatttctcataagatagtgtcatcctctgaccctaaagaaagatcttcttccctgggcgtggtggctcacgcttgtaatcccagcactttgggaggccaaagtgggtggatcacctgaggtcatgagttccagatcagcctggccaacatggtgaaaccccatctctactaaaaatacaaaaaaattagccgagagtggtggcaggcacctgtagtctcagctactcgggaggctgacactggagaatggcgtgaacccaggaggcggagcttgcagtgagcccagatcgtgccactgcactccagcctgggcgacagagtgagactctgtcttaaaaaaaaaaaaaaaaattagctgggtgtggtggtaggtgcctgtaatcccagctacttgggaggctgaggcaggagaatcacttgaaccccgaaggcagtgtttgtggtgagcagaaattgcttcattgcactccagcctgggcaacagaatgagaccctgtctggaaaaaaaaaaaaaaaaaaaa

SEQ ID NO: 58105 - DNA, 2100 bp, Homo Sapiens
ggccgggactgccgctacctttctggaaggcgccggccggccagtcaccggagggatcccgccagaggcggctccgcgtctccagcagcggggcagggacccgggcgccccgccctcgccagcgcccgcccccgcccgcccccggcccgccctctgtatctggcccctgggcagctgcccggggaggcggccagcgagctggggccgcgcaatgtcgcacggagccgggctcgtccgcaccacgtgcagcagcggcagcgcgctcggacccggggccggcgcggcccagcccagcgcgagccccttggaggggctgctggacctcagctacccccgcacccacgcggccctgctgaaagtggcgcaaatggtaagtgagcgcggggcgcgaggccgaggttctacagggcgtcccgggaaagcaggggtccgggagcggacgcgccgggcgtctggacccggccggagcccagggagcatcgcgcagcgggcggggcaccgcgtcgctaaagttcgcggcaggcttcctccgggaaagttgctgccgcagcccccgcgctggagctcagtccccagagccgccccggcccttgctcccgcggacccaggtcgccagggtcgcaagtttctccggccacccccctgcgaagcctgacccgcctactgactgaaaccacgggcaaagttccttttcgtctttcttcctcttctctgggccgcgccgcttcgaacccgagccgggggtggaagagtcgcccaggcggcggcgctgagggagcgaaacccgacctcttccccgtccacggcctcctctttcctccgaacccagcgcggcagggcttccctgctctgtgtgcagtttcgctcgaaggaggaggtcagagggtcttgcgttccatagtggggaaaaagaactgggaccgttgagacggccgtcctggtcccctgcgccctcaagttccgagggagggcccgggtctcagggggctctggagggcagggggtcagttgggaaaggcctgttgtcaggggctggtactcatgtaggggagccagactgttgaatgggagtcacccgtggagccaggcaggatgagtgtctgggcttggattgtgaccaactcagcacaagggcctcctaccagggcagacgttgcctggccgattctcttgttccccactcttttcttttctcccctcccgtttttttcttctttaaaagtttgtaatctgaaacaacttttccgtttgtatgatgtgttttgaaactgggttgggctgtttgtgagtctccaccattgtaatgtttgcaccaagaacggtggggaggggagcggtaagtttcaaaaagaggtgtggggaaaggagtgtggggctggacaaggtcacacacccagaagctggggcctgctaaggtggcctggccccagggggttgggcacaggacgtctgtgcatctatagcactgccattccagacactgagtgtgcatgaggtggccctcatgtcttgcttgggccagacctaaagagaaggggcgctgagttcctgcctccctaagaacggtgtctagatagaccaaaaactaggaagagccatttcagcaacgtacaaaaaaatctggtgctgagcattgttgggtttgagcagggcattttttggcccaggctaagagatttgatcagccaaatagaagagaccagcccatctcaccatccttaaaagatgggctggggtgagacatatcctacctgagcattggaagggatgagtttggtagacagagaatgggatcagaagcctccatcttggcccctgagtttgctggacaaagatattgtgggatgaaaagtcttcttgttggtctatgagtttggtacacaaacataatggagatgaaacctcggcaacatagcgagaccccatctctacaaaaaaaattttaaaaccttgtgtggttggcatgggcctctagtcccagttacttgggaggctgaggtgagaggattgattgaactgagaaggtcagtgaactgtgccactgcactagtctgcgtgacggagggaggcctgtctcaaaaaaaaaaaaaaaaaaaaaaa

SEQ ID NO: 58106 - DNA, 2029 bp, Homo Sapiens
agaatcacttgaacccaggaggcagaggttgcattgagccaagaatgcaccactgcactccaacctgggcgacggagtgagactctgtctcaacaataaaaaataataaagtgcttcattgcagtaactcaagtgtgtagggagaccctgggctggatggcatgcctgctggcagacagggtatgacccaggacccccaggtgagatgaacctgtcttgttgaattcccaagttaggagagttttcagttgttggtatattttgtcaggttagtaatctgaaatcatcaaattgctaatgtgcgaatgtgtattacttaccaaaatgtctatttttattctttttgaagttaagatctgaagaacagctcaggttcccaacattctcagagaataatgtcttgagaataagcaacctgctcttaagtaggtttgtcttgtccatagcagaatttattgccagtgccaaaaatcaattttggctaatacagcaattaatcaaaatttgctgtattgagtgaggtaagggcaattaggaaatcatgagttgggttttctatttgtttctgctgtcaagatttgtgttttcttaatgttgatttcttatttatggtgatgaggagggaggtgaaactatatttagttttcacaagtatatttgaaattctctggccaggaattcacactgggttcccaagcccgttgtgtgctgacaattctgacagagcaaatcattaatgctgatgtgtatttttgaggaagccacttccagggacacttagaaatggttaaaatgactttgggtgtccgaggcaggaggattgcttgaacctaggcgttcaagaccagcttgggcaacatagtgagaccccatctccacaaaaaaagttttaagttagccagtcatggtggtatgtgcctctagtctctagtcccagtcatggtggtacgtgcctctagtcccagatacttgggaagtgggaggatcacttgagcccatgaggtcagggctacagtgagctgtgatcacaccactgcactctagcctgggtgacaaagtaagactctgtctcagaaaaaaagaaaagaagtggttaatatggtaaatgttatgttacatatgttttaccacagtaaaatttttaaaactaagatgaaatggccagtttacagcagagtaaaaattcgaggcctgatattcaccccttatgtgcctaaccctgttctcaaagtattaaacccttgaaaaggtcactatttgctagaaagtcgtccctcggtgtccacggaggagataggttctgggaccactgcagaaagcaaagagcgaggatgctcaagtccctgatataaaatggcaccatacgagcacatcacctatgcacttcctctctcatgttttaaataatttctggattacttgtaatacctaacacaatgtaaatgctgtgtgaatagttgtactatgttgtttagtcactaatgataagaaaatctacaagttaggtatagatgcagattttttcatgaatatctttgattcatggttgaagccaggggtgaggaacccacagacacagagggctgtgtgtccttttgaaaagaataaatcaagctttggaataagaatgaggaaagaaatggaaaattgcccaaaaacgcctttgtcacatttgccgaagagtagtttttcatactaagggtcccgtttgaaataaattttgttagccaacctaacttccttacatttctttagttggattctcttataaacaattatgaaaatttttagatgagattggctacattaaagaactggctttagtattatagcatagtagttaacaaggcctaactcgttaatcatagtgctgtttcactgataaaattttgcgtaggcctcttatggcagctcatgcctataatcctagcactttgggaggctaagataggaggagtacttgaagccaggagtttgagaccagcctgggcaacaatacgaaaccgtatctgcaaaaaaaaaaaaaaaa

SEQ ID NO: 58107 - DNA, 1750 bp, Homo Sapiens
gtgctttcaggagaaggttgtaacatattcctggctgagtattaaagtgatgtgacactcctgtctggtccctgccctcaggaaagattgtgatgtattcttggccaaaaaacccaggtgatgttaccctcctcctttctgcctgttcacaggtgggattgtaaaatatattttggtctagctcacaggtgcaatggtgactctcatacctcaaaccatctaataggagaggtgctgtcttttatagctaggcctagggtaatgattaagatcctcggtctccttttttgtacaaagtcataggaaattaccactttcttgtatactatacacatctcttgtggtacagtgagtgtcattccagggttcagcacacaagtgagattgtggttctcatgtgcacaccccaccaattgttagaattgtcaccataatacaatccacagttaaaattgtgactgtcatatgtgaacatccagccagagttggaatgatgatttatttctaaatccagtactttagcgggtgaaaattctgtctggacccatgaaaaatttacctgggcttagggccagagtaaacacagtttacaggaggaatgaaggctctcatgtgccaatccagttcattggtgaaattgtcagtactgtacttagacccaacatagaaaatgtggtgattctcttacctagaactgggacctgtgcgggattgttaatttattactggaccttcctgcgggagtgattatcacatatgcctatgttcagcacctgagtgatttgattttgctgcctggtcccagtctgaaggctccgcatatttgggtattgtgacatattgctgaactcaacacctaagggatgagagtctcctacctgtgcccttcctacaggggacattgtgacatgtctctgcattcctcacctaggagatgtgactctcatcttctgcttgcaccctgcctacatggaaagctgtggcatattgctgtggtcagcaaccagatgatgtgtttctcctgcctgggtcttaataaagacaggaaagatggttgacatattactgggcccagcatccaggtgatgttttgccttcaggtgacattgtgacatcgctgggccctgcattgacaatttgtgactcttctgcctgtgatttgcacacttgggccattgtgacatattactgggtgtgacactcagggaatgtaatttttatgcctgggccttgcctataggcggcattttgaaatgtctttgtggccgggtgtggtgactcatgcctgtaatcccagtactttgggaggctgagggaagtggatcacaaggtcaggagtacaagaccagcctgcttaatattgtgaaaccctgtctctactaaaaaaaaaaaaaatacgaaaagcagccagccatggtgactggtgcctgtagtcccagctactcaagaggctgaggcaggagaattggttgaattcgggaggtggaggttgcagtgagccaaaatcgtgccactgcactccagcctgggtgatagagtgagactccatctcaaaaaacaaaaacaaaacaaaaaaaagaatgaatgaatgtctttgcaccaatcccaaaggtgatgtgactctcttgtgttacctggtctctgctcacaggaagaatcgtgacctttcacagcatatggttgatttttttcttttatttcttactttttcctgcaggaaagatggtgaaatattaatgaactaagtacc

SEQ ID NO: 58108 - DNA, 694 bp, Homo Sapiens
  misc_feature (622)..(622): n is a, c, g, or t
  misc_feature (679)..(679): n is a, c, g, or t
  misc_feature (686)..(686): n is a, c, g, or t
gaatattgtgcatttaaaagagatgaggtttcaccatcttgcccaggctggtctcaaacccctgggttcaagcgatcttcctgcctcagcctctcaaagtacagagattacaggcatgaaccaccgtgcctggtcctatttttaattttttgaggaaactccatactgtttttccataatggttgtactaatttgtattcccaccagcagtgtgcgagggtttcctttcctttacatcatcaccaacacttgttcattgtttttatagtagccgttctaacgagtgctaggtgatatctcattttggtttgttttttatttatctatttttgatggagtatcactctgtcacccaggctagagtgcagtggcatgatctcagctcactgcaacctcagcctcccaaatagctgggattagaggtgtgcactatcacggccagaaaatttttgtgtatttagtagagatggggtttcgccatgttgcccaggtaggtctcgagctcctgacctcaagttcaggtgatctgcccacctcagccttccaaagtattgggattacagacatgagccaccatgcccaccctaattaacagtatttgtcaaattttaatgtgcatcanattcttaggtttcagctggcatctgtttccagctcttggtgctatttgcaaccttgnatcttangatgaagc

SEQ ID NO: 58109 - DNA, 750 bp, Homo Sapiens
  misc_feature (512)..(512): n is a, c, g, or t
ggaaaaaattcgcacttttttggtataatttctcgcatatgtttcttataacttcatggcactaacatcaacactagagagagaaaagaaccttaagtgggctagcttttttcagaagcatattcctaagttttaccttaaatattcttatgttcattgtttatacataacaatggataatggtaacatttatggagataataattatagaacttaaataaaatgttagccatcaattgggagttttaatgtttaacatatgtatacctgattacacatatatcttaatataacactgtgattacatatgtatcttaatatcttcttcttaatcactctgtatatgattgtgctttgttttcaggaagctcaatatgcacacataaggcatttccaaaatagatgaattacattgaagataattcatgttaaaatatatttcacattcattattccatgcatcttattaacaacctagggagagaggatgttttcatttccattttacatantaagaaacttgagaaatggaaaagttaaggacttactgaaagtcacacattgttagtagtggaactaggggcaaaccccacttggactctagatcagcatgtttcactctacaatatgatctcatagtcaaattaaataactggtatcaggttatattcaatatgtgcttgatctaatccaaagtgtttgttgaattaccacggtatttgggaggtccaaaaaaacggtcctagggag

SEQ ID NO: 58110 - DNA, 418 bp, Homo Sapiens
aattttttttttttttttttttttgcttataaacattgatatttattagaaattaaaatggagaaatttcatgatgttgtttctccagtttgttgcaatatcacctttccggtagcctccggaaatctccattctgcattcatgtgctcatgagaacgaaatcaacaaataacaccttagtatccatatagagatattttggcttgtgtggacctcctacaagggtcatgggagccccgagagtttgtggacctcactttgagaatcactgttctacataattcctgtggctgtttttaacaccatgggcttctgtcttcctcctaccttcctggctcctgcttcttgttaggtttccaagggaaggtgagggttaaagacacacatagagcgagagggcggctcaacagcaaatgca

SEQ ID NO: 58111 - DNA, 325 bp, Homo Sapiens
aacttcaacttgttcacaatagctgagagttactagattttaatctagagttactggattttaatctctagagttaactagatttaaaactagagttaccactgcccattttataaacccttaggtgataatgagaggcacaaaggaatgctgcagaaagacacatccatggaggctgagttttgcaaataaaacctgcttcaacatggaaccctccagtagcctttatgtaaatgtaggacttaagtggaaagagaaggaggataaatattctagcaggtgctgcagaatgcactgaataggctgaaatgacacacgttttttt

SEQ ID NO: 58112 - DNA, 625 bp, Homo Sapiens
ctccaactcctgaccttgtgatccgcccacctcagcctcccacagtgttgggattacaggcgtgagcccccgcgcccagccaggactttgtatttttacggtttcctttattgaagggaagaagtgtttgtgaagttgaattattcgatatttagtttggcgttaacttagggtgtggaacaacaataccaaatataatgaattgtggtttttctaaccagtgaattcatagttagaattagatagtatttgaagggtttcagttgtatttttagatggcataaatggcttgattctttaggtatttaattgcatgggattttgaaataagatagtgtaatccagttaacggtttgctttatatcatattccactgtttttaggtttaagaattttgcttgaaatgtcaaacccttaggccttgacttggggtctgttacaaaaatattttgtgggggagaaatcatagcttttgtctttgaggttcatcagttatagttacccctgggggcctgggatgggaaggagacctattttcactgtgcaccctgttggactgttgaaattatttaaccaatatgtgtatatttccatatcaatattttaaaatttttcaaaaaaaaaa

SEQ ID NO: 58113 - DNA, 441 bp, Homo Sapiens
aagagaatgagagattatctcgatacctccattcctacctcacttctgatacatggagtggacttgagtaagttaaatgggcatgtaatgtgaccccactacttttctctgtttcttgtactttgttgccttttgcctttacttactctaaaatctgtggaaatcttatataatcccacccagcccagatgttttctctttcatgaagtttttcttgttcattcttgtaagaagtagtatgtcattttctaatctctggtaaaatcatttatttcattcatcatacatttatttggatttagaactactgtgtttgtctttgaaggcaaggacaactgtctttgaatccatgtaacatctctacaatcccttatatactaagtcccccataaatatttctcaaataaatgcttgcaaaagtgtgcttcattaaaaaaaaaa

SEQ ID NO: 58114 - DNA, 608 bp, Homo Sapiens
ttgaacctaatttattattcctttttctttttaattcagtctttgatctgaaggtaaaagtctttcgctattcaagtcaacgttgtaaacattaaggcacaataggacatttgtaaaagtatttttaatttctatagatgaataaaaatattttatggtaacttatttctccccctcttcccaccccctaaaaggatagcacagcagaaacaatcgcttgtttgtgcttttgctataggttagagaaagtgaggacatgtcatttccctcttaatcaaatataagccctcatactgttctccactagccttgtgctttgaggcttggtgtcaccctgttaaaatttgctagaatgaggaacagaggagactctccctccccaagtctgtgccttcagtctctgctacttacatccacccagtgttggcaaaatcaccagcagctccccgagcttctgttttttttttttgaaaaaattataaaatatgaaactgtgtgtaaaaaaatgcgcatgtacataaatttttttttttaccatttcccaaaagattgaaaattaaaggatttaattcaggaagtgagcaaggaaacaaattgtaaaaaaaaaa

SEQ ID NO: 58115 - DNA, 3000 bp, Homo Sapiens
agcggacgtatctctcctgctccagtgttccttccactaacccatgactgtgtcttcacaacgttagacctctcttcagctgcattgctggctgcctagagccctagactaatgtaagagctagagttaatgccaaagacagcaaatggttgacacctttacacagagcagttgcatcttgtagtgagtctaaaaattacaaggcagatgactaaacagaaacacaaccaagaaccctcagagtccgcttcactcccctgctacctccactggagcaggtgctagtatccacagctgaaggacctgaagacagatcacatcacaggactctttacagacattccccagtaccatcccggagcctagtagctccactgggttactagactcagaagagcaaaaacaatcactacagtttggctctcaggaatacccattcctaggggaagtgggagaacaccacatcaagggaacacccagtgggacaaaataatttaaacagtagtccttgaatcccagatcttccctctgacatagcctacccaaatgagaaagaaccagaaaaacaattctggtaatatgacaaaacaaggttatttaacacccccaaaatataccagctcaccagcaatggatgcaaaccaagatgaagtctgtgaattgccaggaaaagaagtcagaagattgattattaagctaattaaggagacaccagagaaaagtgaagtccaacttaaattaaaaacataggccgggcgcggtggctcacgcctgtaatcccagcactttgggaggccgaggcgggtggatcatgaggtcaggagatcgagaccatcctggctaacaaggtgaaaccccgtctctactaaaaaaatacaaaaaattagccgggtgcggtggcgggcgcctgtagtcccagctactcgggaggctgaggcaggagaatggcgtgaacccgggaagcggagcttgcagtgagccgagattgcgccactgcagtccgcagtccggcctgggcgacagagcgagactccgtctcaaaaaaaaaaaaaaaaaaaaaaaaaaaaaacataatatagaatatgaaaggaaaattctttagtgaaataggtaaaaacagtcacaacttctagaaatcaaggtcacacttagagacatgcaaaatgcactggaaagtctcagcaatacaatcaaacaaacagaagaactttagcgcttgaagacaaggcttttgaattaacccaatccatcaaagacaaagaaaaaaaatttttttttaaatgaacgaagtctccaagaagtttgggactatgttaattttccaaagctgagaatagttggtgttcctgaggaagaagagaactctaaaagtttggaaactatatttgagagaataattgagggaaactttcccagccttgcaagagatctggacatccaaatacaagaagctcaaagaacacctggcaaattcatcacagaaagattatcacctaggtacatagtcatcaagttatctaaagtcaagatgcaggaaagaatcttcagagctgtgaggcaaaagcatcaggtaacctataaaggaacacctatcagattaacagcagatttctcagcgaagccctacaaagctagaagggattggggttctatttttagcctccttaaacaaaacaattatctgccaaaaattttgtacccagtgaaactaagcttcatgaatgaaggagggtatacagtcttttccagacaaaaattctgagagaattcaccactaccaagccagcgctacaagaactgctaaaaggagctctaaaccttgaaagaaattcttgaaatactccaaaatagaacctccttaaaccgtaaatcttacaagacctatgtaacaataatatgatttttaaaaaaaggtattcaggcaacaaatagcatgaggaatagaatagtacctcacatctcaatactaacattgaatgtaaatggcctaaatgctctacttaaaggatacagaatggaagaatggataagaattcaccaaccaagtttctgctgtcttcagtagactcacctaagagtaaggactcacagaaacttaagtaaaggggtagaaaaagatactccatgcaaatggacaccaaatgtgagcagggatcactatttttatatcagacaaaacagaccttaaagcaacagcagttaggaaagaacaaagagggacattatataatgataaaaggactagtccaacaggaaaatgtcacaattctaaatatgtatgctcctaacactggagctcccaaatttataaaacagtgactactagacctaagaaatgagagagcaacacaataatagtgggggactttaatactccattaacagcactagacagatcatcaaaacagaaagtcaacaaagaaacaatgaacctaaactatgccctacaacaaatggacttgacagatatttacagaacagtctaccaaacaactgcagaatatgcattctattcatcagcacatgaaatgttctccaaaatagaccatatgataggccacacaacaagtctcagtaaatttaagaaaacctaaattatatcaagtactctctcagaccacagtggaataaaattggaaatgaactccaaaaggaagccacaaaaccatgcaaatatggaaattaaataacctgctcctgagtgatcgttgggtcaacaaggaagtcaagatagaaattgaaaaattctttgaactgaacaataatagtggcacaacctatcaaaacctctgggatacagcaaaagtagtgctaagtggaaagttcatagcattaaatgcctatatcaaaaagtctgaaagagcacaaatagacaatctaaggccatacctcacagaactggagaaacaagaaccacccaaacccaaacccagcagaagaaaagaaataatgaagatcagagcagaactaaatgaaattgaaaccaaaaaaaaaaaaaaa

SEQ ID NO: 58116 - DNA, 2357 bp, Homo Sapiens
ggagacgggtgagttgcggcgtgggaaaataggcgctgctgtctgtggtctcttcagtttcatgaacattgaagctttcacatgggattactcattggttgaatataaacagttctttgtatagaattagaaatagagatagtgttaatcggctcctctgtgaacttggtgccgtgttagggccctgttctgttctccacacccctgtcagcagtgcagtgtgagcgattctgtgttctgagggtctccttcctgcaccatggacgctcactactgtgtagtagtctctgtggaatgaaattctcctcgctcctgttaacgggcttgtttctttggtaacctgagaacagtgctgacaggaatgttctcgcgcccaccccggagcctcctgctcttggggcgtgtgctctgcacgtgtactggcatctgctcgtggagtgtgtgctcctcacatgtgcctgctgctcgtggggcgtgtgcttcacagaggcggctggcacaggctctgtcctcggaactcaagtgttcctgttgcttcactcccatttcacactctgccaacctttacatttctgtgaatctgagaggtatgaagtagtatctccctgtaggggtttaaaaaatcctttgtattttgaaaattttcaaccacagctaacttttgaaagaattttacggggaacacctgtatactcctcctagatcctgctattaagattttgctatgcttaggctgggcgcggtggctcacgcctgtaatcccagcactttgggaggccgaggcgggcggctcacgaggtcaagagatcgagaccatcctggctaacactgtgaaaccccgtctctactaaaaatacaaaaaattagccgggcgtggtggcgggcgcctgtagtcggtggtaatttcctatgcgtcattgacccacagtgaggggacacatttttacaagtgcgggcaccgtgtgactcacaccctgatcctgccgtgcccttcccactcggccccgctgcccaccctcccctccgcccagaggtgacgctgctctgattttcccaccgtaatagatctgcctgtcctggagcttctgctaaacacagtcacccagatgtgtggggccagtcttctttccctcagcttttcagacccacgtgttgcatgtttctgttcattgctgcttcgtgctgaagtgttccattatatgactgtcccacagtttgtggttctgtttttcgttggacacctgggctgtttccgttcttcagaagacacagcctttggaagcagctgtgactgaagctgctatgagcacgtccataataatcttttgagtggctgcgtgtgttggtttctcttgggtaaatagatatctggagtggagctgctgggccctggggtgggtgtgggtgtgggtgttatttaataaggaatggtcagctctcttcccgaagcagtggccggttccacttgtgctggaaatgttggggagttccagttgccccctgttcataccagccccaatggcgtcagtctttctgtttttagctgctctggtggatgtgtggtacctcgtggttttaattctcatttctctcatgactgctggtgttgagtgcttttcatgagcttgtctttcctgaagtgtgtgttcatgtcttctgctatttttaatgggctgtagtttttgttagtgagttgcagaaggtgacattctggacaccagttcttttcaggtgtgtggattacaaataccctcccagtagtggcttggctggtcaccttccgaagtgtttgttgatgagaagctttgagtttttgataaaatctaatttattacgtttttcttttgtgattattgcggtctgtgatacaggaagaccttgtttagcttcagtaacaaagattttcttttatttttctctaaaaatgatatggtttcacagttagtcctgtgatctgcccgggactaattctcaagagcagcattaggtgagtgttgaggctgtttcccccatgtagatactcacttgtctcagcagcatctgttggaaaggctttttaggccgagcacagtggctcacgcctgtaatcccagcactttgggaggctgagtcgggcggatcactcgaggtcaggagttcgagatcagcctggccaacatggtgaaaccccatgtctactgaaaaatacaaaaattagccaggcgtggtggggcgtgcctgtaatcccagctactcgggaggctgagataggagaatcacttgaacccgggaggcggaggttgcagtgagccaagattgtgctgctacattccagcctgggcaatagagcaagactcatctcaaaaaaaaaaaaaaaa

SEQ ID NO: 58117 - DNA, 831 bp, Homo Sapiens
ccaggggattatggaatgtttggtaaaatccctggcctctgtccaatagattagctagtagctctctcacccctagatatgaaaaccagaaatgtctctagacattgccagtgtcccttgggggtgcaaaattgatgccagttgagaactcttgaagtaaccatagcacctctgcactggaccggaaaagcgaatgtcttcaaggaaggccaggtttttttttttagagtatgagtcactctaagaatcaaatgaatgattgtctatgccatagagggtgtctaagataactttggcctatttaattttcaaaacaaatgtaatcaatagtctaccttaactgtagttgtagaaaaaacatttacacccatggaatgtgctgttttaagaagactagttttctggataaaactagcaggataatttagttttaaaacatattcttcaccaaaaattgacctgctttacagagttacagatgatgtactaaatttcagagaacatccaccaaaaataatgatttttactttacattaagtgtttctggctgtgcgtgatggctcatgtctgtaatctccacactttgggacaccaaggccggaggattgcttgagcccaggaattcaagaacagcctgggaaacatggcaagacctcaactcttctaaatatgaaaaaaatatcagggcatggtggtgtgcatctgtggttccacctgctcgggaggctgagatggaaggatcgcttgaacccaggagttccaaactgcagtgagctgtgattgtgccagtgcactccagcctgggcatctctaaatctcttaaaaaaaaaa

SEQ ID NO: 58118 - DNA, 625 bp, Homo Sapiens
gaagtgttggaaatgctacagcaggtcacaactgccctcataaatagtgacatagcagaccgtgagcagaggtgaggaatggattgtgggctgtgaccagctgccctgtgggaagaaaagtttgtttattgaaattaaatctttttagaatatagaaggatcaattttatatagagagatttttgtgagaataggctaaaagggcaagtgtttgaaagccaagtgcagtcacactctttcatgtgctttcaggtgagattgggccaacagccatgatctaagggtagcgaggttgtggagggcacagcctaatctctgccacttgagacttctactgccatcactcccaaaatggcctttcctttaattatcaaggtcagcaccatgcacacttagtttcctcatgataaagacttttgggaggaagaagtgacttaccaactgctacacaaaggatgacactgatgtggtacctcaagattttactgtaattttacttctccaaatacatggctgacctatatagagggcagacttctctttcacagtaataaagccctttctcagcctttcacattaaaatttctgctgtaaccccatctctactaaaaatacaaaaaaaaaa

SEQ ID NO: 58119 - DNA, 583 bp, Homo Sapiens
gaaagatttgcctaaagtgttgatattgaactacgcctgtttacctttaatcttcttttcttcccttgcagtatctcatcagggttgcccccagatgggaactaagaatgaattttggtaacttcctagggatggttgcatgaccttgtttttttctatgtgttctttaagcagtgagttctaggatgtatattcaggggtatcatagtatgtttccccttttgtggaaaaagtaaaccccttctaggcatagactcagacacaagaaaacagctagtacgactgtttacatgatgtctgccttctactgagcagttgtcacctttcccattgcagtgttgccttaacccatctggtgagtgccattggtgttaccaaattcttaaagaccttgtttggactttggcctttaaaagtggccagttctactcttcttagactgattatgcaatttttaaaattgcttttcactctgtactttttccctgtctctaacttgatgcttactcttggctttttaacaattaggggaactttcgctaaatgacaatgaagatacacacacccacacacaaaaaaaaaa

SEQ ID NO: 58120 - DNA, 1727 bp, Homo Sapiens
atttaaatgtctgtctacccagacttactcgttcaaaaactgtctcatttacattttgtagaagtagagtaccatagtggatagaaccacaggctctggggctgtcctgtctggggttatttgctagctctaccacttaacaatcttagacaagtcacttcagtcttttttttgagacaggatcttactttgccacccaagctggagtacagtttaagagctcactgaagcctctacctcccagactcaagtgatccttctgctttagcctccctaagtattgggattataggcatgagccactgtgcccagcctcacttctctttttttttttttgggatgggcccttgcactgtcacccaggctggagtgcagtagcctgatcatggctcataacagcctcaactttctgggctcaggtgattctcctgcttcagcctcccgagtagctgggactgcaggtgcatgccacaactggctaataattttttgtagagacaaggtctcgccatgttgcccaggctggtctcgaactcctgggatcaagcaatttgcccacctctgccttccaaagtgctggtatcgcaggcctgagccaccgtgcctggccctcacttcattgttgatgccttagctccctcatttgtaaaatggggataataatagcaccaacttatgtggtggttgtgagaattcaatgatttaagctataaagctggtattcttggccttagcttatcttgaggggggtggtatttatttacaaataaaaggattatcagcacttagctcagtgtctggcacatggaagaaggcttttaatgaatgcagaatgaatgaataaatgagagcaaatggtacagaatgagcctacacaaaggagatgtttctcctctagttctaccagttggcaagatccctacagctaaaaacagttccaccatataatctccagacctggcctggccacagagtagatcagactaaaaatagagcctgctaagcttgataaaaaagactgatattggcacaccctgtccttccagactcctgcaagcctcgctacttctactctggtgtctagaatccacctcacaggaaatactaaagaaatgttttcctttaatgtccaaaatcacaccagcatatttggaagttagttttcaacaaaggttctactgactgagtcagttccctggatttagaaggaaataaatttcttaagccctaactagaacaagaaatcaggagttagttcatacttagttgaagaatgatcatgtatgaattcataaatatagtcaatgactacaacaaaaaaatttcgtgatcagaatgcctatttcagttggatatgagtgatcagatggtagtatgtgtacccattgatgccatacaaattttgtaggaagctggtagagaatttggttttaaagaggtctgtgttggccgggcacggtggctcacgcctgtggtcccggcactttgggaggccgaggcaggtggatcacgaggtcagaagtttgagaccagcctggccaagatgttgaaaccccatctctactaaaaatacaaaatttagctgggcacagtggcaggcacctgtagtcccagctactcgggaggctgaggcgggggaatcgcttgagcccaggaggtagaggttgcagtgagccgagattgagccattacactccagcctgggcaacagagcaagactccatctc

SEQ ID NO: 58121 - DNA, 444 bp, Homo Sapiens
tttgagacagagtctcgctctgtagcccagaccggagtgcggtggcgtgatctcggctcactgcaaccctccacttcccatattcagccatcccgtgattcatcccgtgattctcgtgcctcagacatctgagtagtcaggatcacaggtgtgtgccaccagccccagctaattgttgtattttttagtagaggcatggttttaccatgttggccaggctggtttcgaactcctgggtctcaagtcatctgcccgcctcggcctcccaaagtgctgggattataggcgtgagccaccatgcccaccacagacatagatataactctcttccatgtgtgtacggcctttgactcagatcttgtgatgggttagataaaccaaggatcatggcatcttccagttctaatgagtcgtggtggctccctggggatgtcatactgagaa

SEQ ID NO: 58122 - DNA, 687 bp, Homo Sapiens
agcaattctcctgcctctccttaaaacatctcggtgtttgtccgagatgacggtgctcctcctcaatcaaccaccacacctggccaatattttgtagagatggggttttcccatgttgcccaggctggtctcaaactcctgggctcaagtgatttgcccgcctcagcctcccaaaatgctggattacaggtgtgagctactgcacctggcacagattttttaaaagatcaaattaggtactaggtataaagcatttaaactgtgtcaggcacattttaagtgctcagtagatagtgctggtaggctggctatagtagctcacgcctctaatctcagcattttgagaggctgaggcaggaggatcacttgagctcaaaagttcaagcccagcctgggcaacatagcaagaccttgtctctactaaaaataaaaaataaattagctgggcatcaggcatcgtgcacaatcctgtactcccggctacttgtgaggccgaggtaggaggattgtttgagcctgggaggtcaaggctgcagtaagctatgattgcaccactgcatcctggttgacagagcaagattctgtaagtaagtaaataaaataaataaataaataaataaatatagcaagctggtttggagtgaggaatattaatagttgtgttaaggaaagaaaagaaaaaaaaaa

SEQ ID NO: 58123 - DNA, 7243 bp, Homo Sapiens; identical to SEQ ID NO: 24495

SEQ ID NO: 58124 - DNA, 4358 bp, Homo Sapiens
agcggtatgaattgaaataaactgtttattttatgttgtgtattatgctcactacctgggttatagattcatttatacaccaaacctcagcatgatgcaatatatctatgcaacagacctacacatgcacccctaattctaaagtaaaagttgaaaaaagcaaaatatgtatatatatttacaataaaagaaaaatataaatttaaaataaaaataaaactgtaagaatgaaggaatagtaaattattttttactttataaggggaaaggattataggcttattttattattttgagacggggtcttgctctgtcgcccaggctggagtgcagtgatgcggtcgtgggtcatggcagcctccacctcctggacccaaaccctactccaccccctgagtagctgagactacaggtgcacaccatcacacccagttaatttttgcactttttgtagagagggggtttggccatgttgcccgggctggtcttgaactcctggactcaagcgatctgtctgcctcagcctcccaaactgctgggattacaggcgtgagccaccatgcctggcatctagtaatttaaaaaatatttccctttacatacagcttttaagaagcacaatgttattttatttgtatattatatatacactcttcactattcattttaaatacaaagcagatcttgagatatgtagaaacctaagccatctttaaagttgaggatgttcttatttataaaggttttcctttacattctgatttcactatttttgtaattataactaaactgtgatttgttataactcatgatcacaaattgagcatgtatctgtacctcattaaaattgtatttagacattaaaaagaaaaagaaaaagaggccacagatagctgctctgtgccttccaccatctgaagacacaaagaagagttggcatcagtgaacttagagcaagtccttaccagacatggatttgccagtgccttgatcttgaactttctagtctcaagaactatgagaaataaattatgttgtttatcagccacccagtgatagtttgttatagcagcctgaatagactaaacagtaagctttttttttttttttaaagacagagtctcactctgtcacccaggctggagtgcaatggcacgatcttggctcactgcaacctctgcctcccgggttcaagcgattcttccacgtcagccccccgagtagctgggattataggcacccaccatcatgctcagctaatttttgtatttttatagagatggggtttcaccatgttggccaggctggtcttgaactcctgacctcaggtgatccgcctaccttggcctcccaaagtgctgggattacaggcatgagccactgcccctggccagtaggttattttttattttgaagtatcaagattattattacctacaaagttatgcaactgtatatccactataatagtatttacagtaatcaaaaagtcataatgtaaatgtcgaaacaacattgaaatagtaatgaataatatacatgtagagtaaaagatattaaagaagatgcttgcataagttgctaatgatgaatgttaaagtatattagagtagaagggcatttttcaactgatatggaaaattttcctgtatatataatggttaataatactaagataaaattttactttttctaaaattctttttttttttttttttttgagatggagtctcactctgttgcccaggctggagtgcagtggcacaatctcagctcactgcaacctctgcctccgaggttcaagcgattctcctgcctcagcctcccaagtagctgggactacagacgcgtgccaccatgcccggctaatttttttttttgtattttcagtatagacggggtttcaccatgttagccaggatggtctccatctcctgacctcctgatccgccctcctcggtggatcccgcccaaagtgctgggattacaggcgtgagctgcgcccggcctttactaaacttttttaagtgaagtggagatagtttacaaaataaatgttaactcttttttttttcaatagcaacaaaagcacagatttattgaaatgaaagtacactccacagagtgggagcgggctcgagcaagtggcactcgagccatgatgacgtcctaactagtggagttaggaatgctttgtatgttgatagtcaagtgctttactaatccaaaagccttattttcattgtatttccattcatattggctaatctctggaaaattactcaaagtttttattaatagttggtatttcaagctttttaaacaaaagtctaaggaatcatttaatgaatgttgatattctacatattttaatactgaagtgtgacatgatttttccctgagtactgttaagtttagcctgaagctcccaccttatgtattttaaacttggcctaaaagtttctctgtacacagtaaactgtaacctaactggttgtgtaaacagactgcaacctactcttgtgctaatcactgaggttcagccaattaaaggcaaccagttgttcaacctgtgttcaagtaaggctgaccctgagctgtaactgacccgtctgtttctgtacctcacttccgttttctgtgtgtcaccttcctttttctgtccgtaaataattttcgactatgcaccagcaccagtgtctttgaacctattcttgttccaggactgcccaattcttgaatccgtctttgctcagttaaactccgttaaatttaattgtctaaggtttttctttcgtaatactatcttgaattagtcacacgttcactgatctaacaaagaaagaatgtaaattagaaaattaagtagtatcagggacatatagtatttatataattctaaatacacggtaatgtctaatattatgtagcttgtgtgtttttcatccaattttaaacatcaggtctttagactttgattcctttcattttcaaatttctaatgaaatgattttggtaattggtaattatttttttgtaccagagaaagaaaatgtacaaataaactttcaggaatgtaattaactatataacatcaaaggagaatcagtgcattaaaaagccaaatttttggctgttcctatttatacatgtggcttaaagatctttataaaataaagatggatatttattctaaaagggtacataggggtgtatgtgttaaatagccacattttagtttgtttgaatcaagactcaaatggaattgtaaagggacagaatcttattaaaaacaacatgaaaatgacttgccggccattgatttgtacagcttggatggcaagtgttaaaataatggttatctagaaattgtagaaccctattttatgatactattatgtaagagagtgttggcaagttatttaatggagcaggtttaagtcatgtgagacttacaaatatttgcatagaaactgaatcccagtggtggcatgtggaaataattttttaaaggatatgcttaggctatttaaaagttatttagtatcagatttcagatcccattttagagctgacgtgaatttgaaaacatgccaagctttatgttatagtctacattacaactttagtctcaatggaatctaaatactgccttgtgagttctgtgaaaaaatttaatatagcataacagacagaaatgattgtcttgtactttctgaaataagtgatactgcttcttcctccacattagtgaaaaaagactgaggaaggggcttttataagcaaaaccatttatacatttgaacactctaggagttgtcattttaaaattagttctcaaataatgagatacaactgtttattatataatcaaaacactacatgaaaacaggaaaactgttaaaatagtactataactgttacttgtatttgattattataaactcctgggaaaatgggataaatactgtattaaaaagaagatatcttcccactcagtaccaaaaacttccagatgtaagtaaaaatttaagtgtaaaacataaaaccataaaagtagtataaaaaatacgtgaagtaaatatagaatattagaatgattcccatttctagcaggtacctaaaacaataaataaaaagacttcatttaattacataaaaatccatagggtttttatataagagaataaaatttgaaagcaaactaaaagagaagtttgaaatatatatgacaaatgcctaatactctgattatatgatgagtacttataaataaaaaatttgtagttcatagaagaaatacaaatagctcaaaatttataaatgattcaatcttaagagcaaaaaaaaaaaaaaaa

SEQ ID NO: 58125 - DNA, 3095 bp, Homo Sapiens
aaggagtttgttcatttaaaaaaaaaaaaaaaggaaatttgggtgcagacaggcacacagggagaacaccatgtcaacacgaaggcagaagttggagtgatgagtctacaagccaaggattgccagcaattcatcagaggccaggacagcagcctggggcagccccctacatggtaccaactccatcaacaccttgatctcagacttccaacctccagaactgtccagccctccatgaatgaggaacttcctggggccactagtgcatgctgcagctcacacagtcaactccatccacacctccacaaacagctgccctttggccactactcaggcgtaaggacacacccagcagggtatgccctctggaggtcagaccagggaagaagcccttgcacagtcaggagccagctcagcacctgtgatgctgaattctatgtggcaacttgactggacgcaggtgctcggattaaacctgatttctgggtatgtctgtgagggtatttccagaggagattagaatttgaatccgtggattggcaaagttggtgtctgccccagtgtgggtggtcaccatctactctcctgagggcctgaagagaacaaaaggcaaaggaaggaggaattcgccctcaacttgcttgccgcctgcctgcttgagcagagacatttcatcacatcttctctggccctcgactgggattcacaccattggcttccctggttctcaggcattttgacttggactgaactacaccattggctttcctgggctccagcttgcacatagcagattgtgggatttctcagcctctattattacaggcgccagttcttcaaaatcaacctctttctctctgtctctctctctctccctagatcacagtctggaagtctgctcacagtctcaaggttggcatatcccctagagcccccagactcctcatcccatggagaccaacatggccaggggagggccagagcagggccttctaaatcacagaccccagggcaggagcccctccggtctggatctaaggatggtattttcaacaattcctaaatttttatcctaggctctccaaatgggagtctaaaggtctcaaaacatggtccagaagaagtatgcaaaaatgtaaattcctaggccccaacccagacctatgaatcagatgatctgtatgggggttcaaggaatttatattattaaacaatcttcctaaatgacttgtattcatactaaagcttgagaattgctatcaaacagctagaagttggagtgaagggtcctgcctttcccatgaaattcatcaactctatgccctcaaaagctgggctcttggatgagctgctctccattctagagacattaccagctaggtagcctgctggtcctcaggaagttaagcccagactcttcagcacagaatcagataaacactgattacattgtactctacagttctgagaacaccattacttaattcccggcaagttgcaatgtaattgagtaggttgtagttttttgggtttggggtttttttgttttttaaatatatcaggcgtagttagccagcttcctagaaacaccatgatctcttggtgaaaattccagaaatatgcatcacttcctaattaaagtagggaatttttaaaaattattaaaccacatgctttctaattcctattgccctttcttttcacccaccattcagcagtcagcagacactttctgggtacaacagggtaggaccatccaggcagaacaaaagccattgatcatgaactacagaggagagtttggtaaatggacaccagaaaccatggcctacaggggcctggttttctcccatctaaatactaactaggcccaacgctagttgggcttagcttcctagatcagatgaaattgggcacatttagggttgggggtatggctctctattgtaagtagcaagagtttgagagaagaaaaagggattttcttttttttttcttttaaattttagagcattaactttaaacatcaagatccaaaccccaaggattcagagaatcttgtactataaaccatttgtattagtcagggttctccagagaaacagaacccataggaggtatagagatagagaaatatggaattggctcccatgattatggaggctgagaagtccctcaatctgctgtctgtgagctggagacctaggaaagcttagctggtggtacaaaccagcccaagtgcaaaggcccaagaactaagagcaccattgtcagagagcaggaaaagacagatgtcccagctcaaaaagagagagcaaattcaccttccttccaccattttattccgtcctgttccattcctcaacaggttggatgatgagggagatctttatccatctcaagttttttgtgcaaatatggaatacaaatgaaaaatacttaaagcacatcatcattgatttccaacttagactagtttaacttccctttttcttctatcctgtcagttccttgagggatcctctctccttgttcatctctgcatctctagtaattagcacagtgccaggcacatggtaatatggctaaaacagtggattattggtctccaacataattaagcccatccaaaagaaaaaccaacctcataaatctgctttgcaaagttcataaacaatggatatgctatgtctcaaaggtgctggccaaaaaaatttaagaacttgggaattatgtgttattttgtttgtttttttcaccaagcctacttttctgtcacaagagcccatatcaacaacacacccatgtatgtccttctttttatctacttttctccatgaagtttgtcaccatcaactgttaaaactgtaaagatttgatcagctaaataagtggtctttgaactaattcctctcgtacttcctaaaggaactttgaaaaactatgtatccccttgcacattttcaagcagacacctaagatttttcatcataaatttgaataacttcaaaatatgtacttattagcatattgtaaatattgatttttaaataaaatatatcacactttgtatccaacgaaaaaaaaaaaaaaaa

SEQ ID NO: 58126 - DNA, 2085 bp, Homo Sapiens
agcggaggctgctgccccctctcgtttacacaagtaggaagaggaaagagaacctggaggaggtatggcacacatggcctctgcttacatatcagagaactcagtgtcctggccacagtcaaatacaatagaggccaggaaaggttgtgtatctcggctaacacatgtccagctacaagtttctattacagctgatgaaagagacaactagcgggctctgtacattgattcaatcctgtctgaggatgaccatatagaagcataaggagaggagacaagtgagtcagatagtggccaagtttctgatttgggataccattcacaaagatggggagaagaaaaagtagaagacatttggaagaagaaaaaacattgcaattggacaagttgactttgagattcctatgagcaggggtatactgacaaacctgctctcccagaaaacaaaaacaaaaatcctgtttatagcctttgatgacttccacgatctaaatgtacccatcatggcctatttcaagccaccaagatgatgtcactgaatgagcagttggaaagaaatgtgcatgaataggctttcataagccagcaaaggctgggttcagctcacctctaccagtgaggatttccaaatggaggcatcttaaagacactgggatatgcagagctcaagctaaggagtagaatctagtgcattctgtgctacctgacacctattggtatgtaaattgctctgcgcatccagattcaaaacacagaactttttggattccacaaaacgaaaccactcacacaaaagctttcacacaattgagacttcactgaggatttgggtcctggaaggaggaagcaacaatcctgagtgaaacctcgacaagaagtatccaataggacattcgtcatgtcctcaaatacaatgcttcaaaaaacgctgctgatcttgatctctttttcagtagtaacctggatgatttttataatttctcagaacttcacaaagctttggtctgctctaaacttatccatctctgtccattactggaacaactccgcgaagtccttattccctaaaacatcactgataccattaaagccactaacagagactgaactcagaataaaggaaatcatagagaaactagatcagcagatcccacccagacctttcacccatgtgaacaccaccaccagtgccacacacagcacagccaccatcctcaaccctcgagatacatactgcaggggagaccagctggacatcctactggaggtgagggaccacttgggacagaggaagcaatatggtggggatttcctgagggccaggatgtcctccccagcactgacggcaggtgcttcaggaaaggtgatggacttcaacaatggcacctacctggtcagcttcactctgttctgggagggccaggtctccctgtctctgctgctcatccaccccagtgaaggggcgtcggctctctggagggcaaggaaccaaggctatgataaaattattttcaaaggcaaatttgttaatggcacctctcatgtcttcactgaatgtggcctgaccctaaactcaaatgctgaactctgtgaatatctggatgacagagaccaagaagccttctattgtatgaagcctcaacacatgccctgtgaggctctgacctacatgaccacccggaatagagaggtatcttatcttacagacaaggaaaacagccttttccacaggatggcacctggagagacatctatagcaggaaatcagaaggtccaaagtgggagttgaaatgatgaaggatcgtaaacacattgatgtcactaattgtaacacaaagtcatcatggacttcttcaataggccaatggggtgagcatattgtggaatgcagcagaggataagcctagaaagagaggaagaacctaatcatgaaggttctcaagtgtcatgctgaggatttcagtgattattcagtagacttgaaagccacagaaaccaactgaggaagagagtggtaaaatgtcactaaggaatataaaataaaattcatataaatagaaggaaaaaataaaaaaaaaaaaaaaa

SEQ ID NO: 58127 - DNA, 1952 bp, Homo Sapiens
agatcaagtgggcagggcttcaccctaaaaggagggggcggggatccaccctagaacaagggggcggggctccaccccagaagaagggggcaaggttcagccctagaacgaaggggcggggccccaccctagaatgagtgggcggggtctatcccagaaccaggggattggactcaaccccatcaaggaggcggggctacactttagggcgacggagcagagctccagggcagggctccactgtagggcaacggggatgggcttggagcgggactctggggacgaggctccactgtagggcctgggggcagagccggggcggcgcgtgaggctaggcttcatcctagaatgagtgggcggggctcgactgatgctgatggtgagcggggccttaccgacacgcgggaccgctcgtctctagaacgcactggccctggtgacagtcgatggcgttgtccacgcccgacgtgcatttggtgacacagcggagccgggtggcctccaccagagggaagtagaactcttcatagcccgtgggagcggcgcggcggcagatggctgggggttggggaggggtatgcacagagacaaggacctcatccattctattcaggggcctgataatggtgcctctgaatatgcgcgaggaggattccatttccgaggtgggatgctgtggggtagaccctgggattcgatgaggggaggccaccgccagcaccctcaccctctcctcgtggcccctgctgtcctcaggtggaagccactaaccaacgccaggaagagcctccctaggccacatgacttgcctcccccaaaggtctctccctgcccacaggcttcaatgggcaaatgtccctggtggcaggggtcatggccatgggagaccactcagccctttaccccaccctcaccttccggggtcagctctgtcttgctgttgttgttcaccttgatggagtcaggcttaaaacacagggctgcggaaacacaggcacagatggaatgggcggggcaggtcaaggggttagggccaggaagcaggataggcacagggagggcagtgagggctctctccgtctgggggagtgtggaggggccacaggggaagactcctgttctctcccttatctcccctgaataatccgaggtcttcagccatcgggaaatgctgagcctgacgatcagggggtctcttccccagtacccaggtcctggggagaccctccctagccccactcttgatggcattgtgtgtagacttattcccgttctcccaacctgccagaggtaccacagggctggcacctgagtccagtggccccctggctgagctggagtgggctggggtgacacctcaggccctggcccctccctccagcccgggctcactctgggagtcctggcagctgttcgcatcctggctggcgttctggagcccctccttcagcgtggtcttcacctgctcatactcgctctccagctgggggctgaagggcatctccagcaggaccagggatgggttctcactatgttgcccaggctggtcttgaactggtttcaggtgatccacccacctaaccttgccaaagtgctaggattgcaagtgtgagccaccacatctggcctgacgttctcgttgcatcaagccatcatccaccgggcgcccctggacgcgcgttctctccctctctctctttctctctctctctctctaatgctgacccactcagtagagcaggggccagccagagggggacgaagtcaccaatccaggcaccaccttcccacatgtccctgcaacttctctctttccagtgtgctgaagaagggaggtgccacccctcctccagataaatggccccagaaaacgatccaaaaaaatacccagggagcgattccttatgtaccccctccacccctctctttataaaatctgatgattacaaaag

SEQ ID NO: 58128 - DNA, 1150 bp, Homo Sapiens
agcggacatttcacagatggcacagagtggggaagtcagtgacccaaggtggcaagccagctcttgctgatggtgaggagcctcattatcttaagacaacacacagtggagatgtgctttacgtaattggcctgccctgtgaaaacccctggctgttttttcagataaggagactgaagcatctagagttggagtaatttccacaagatcacagagctgaaaccacaggaagaggccaatatggacttctccactactttatttcccctgagcctggtcagcttcttccaaggagattactgggaggaagcttctaggatttctggacattggattccctgctggtttccccacctgattattgaaattgatttctggagttcaggaaaaagcaagtcatcatatatcaacctattatgtgtgttaggctgtttgcattatcacatttaatccatttgacgctgtgaaggagcaggtagtgttatctgactcaagtctgtccttcaattaatctcaccacctccaggatacctttatgctctttgtcaagaactctggtagagcaaagaaaatggggatagtttgtcacgttcaaaaatcgtattgaccaagactatcctctctctctctctcttttttttgagacggagtctcgctctgtcaccaggctggagtgcagtggtgtagtctcagctcactgcaacctccgcctcctgggttcaggtgattctcctgcctcggccttccgagtggctgggactacaggtgcatgccaccatgcccagctaatttttgtgtttttagtggaatcagggtttcgccgtgttggccaggatggtctcgatctcctgacctcgtgatctgcccgccttggcctcccaaagtgctgggattacgggcatgagccactgtgcctggctgataatcctcttttaagaagaaggggtatatatttacctagggaattccctagaggagaagaggcagaaaggcataaaaggagtatagtaaactgaaatcaagacatctaaatctaagacctggctccattactgtacccctttggaactttgggtaaattcttaattctttctgggtctcaattttctcttttaataaaacaaagatttggagcaaaaaaaaaaaaaaa

SEQ ID NO: 58129 - DNA, 609 bp, Homo Sapiens
gcaattctcctgcctcagcctcctggatagctaggattacaggtttgcaccaccatgcccgacaaatttttgtatttttagtagaaacagggtttcatcatgttggccaagctggtcttgaactcctgaccttaagtgatccgcccaccttggcctcccaaagtgctgggattacgggcatgagccaccgtgaggcaggggccataaaagaccatttaaaaagaatgcagggagaggccaataaccaagaacaaatatcaaagagagagacagaatcccatcagaaaagtgtcaggaagcctggaatccagggtgagctggatagtaagtataataatacttaataagtattaagtactggataataagtataaattaagtataatatataaaaaaatcctaaaaacaaccaaagacataaaaagctggtaagaaacaatcctacagaaaataatggtgacagaataatccagatatggaagactggaatcctagtgatgtcgagttttgtgcattttttaataatgatgtagttatttctgtcaagactgcgatattatttttatcttttttattatacagatttgttttagtttcgtaaaaaaaaaa

SEQ ID NO: 58130 - DNA, 392 bp, Homo Sapiens
ggcgggcacctgtagtcccagctacttaggagactgaggcgggagaatagcttgaacctgggaggtggaggttgcagtgtgctgagatcgcgccactgccctccagtagagtgagattccgtctcaaaaaaaaaaaaaaaaaagaagaaatggagatacaaacttactacctacctccttacaacctaccctcacagtattactgtgaataaaagtgtgtgtagcactgggaacactattcacagagcactcatgaatgtttgttctttgttattagttactagagaggcaaatgtctgccagggctgaataatatgtgtgaattggtgattgtcgcacatatctaaagaagtagttatttttttcaattaaaacttaatttaaaaaaaaaa

SEQ ID NO: 58131 - DNA, 2534 bp, Homo Sapiens
ttgaaaagaagtaaacatgttaatgaaacagaaaaaaagtaaattaatagaccaattcctggcaaagatgatgagaatgctaattcagtttaagagggagaaaataaatcatcatctctgggggcctacaattcagaaagacagtccagggcaggcgggcagactctgctccacgaagtcatccagagattgaaactagcaggtgctctgccattgtataaggcatcctttttttttggtctgcatggcagaaattagatctctgaaacatttgtgttccagacaataggaggagaaagaaaggagggagcattacaaacaagatcttaagaccaatgttctggaagtgacatgtgtctcttctgctcatattccatcagtaagaacctgatttttggtgagaacacaggggactgagaaatgtaatatagctgggatgccatgtgcctggctggtagaagaaaggaaaaacatatttttgtggtctacttagcagtgtctctcacacctgctacagtggacctttataaattatgtaaaagtagtgtatatatggataaaactaaatatttcagtgacatgaagtgttctgagaaaatgtaaatgaaccaaattgaagaaaagagaagtagaaaatatgaaaagataataattctttccaacattgcctttgtctaaggcagttttactgctttactgctgtgtcttttaactttcaataagtagataaataccatattatagaaacttcttcagagcattataaaaaacaatttgccatcaattccttttgaaaaggtagaataatcctgatgctcaagcttgaaaaatataatacatcaaaggacattctagacccatctcattgagaatagagatgtaaaactcctacataaaatattaccaaatataattcagtagcctattaaatgcatcatgcatgatgatcaagcatgacttatctcagaaatacaatgaagatttaagaaaactatcaatatgtgattacttatatcatgcttcccaaaagaaacactaaataatactactccaaaaatgaaaaggcaaaaagcatattttcttattcctgatttctttgaaaattgttttttatagtactaggcaaaggatgattttttagtatgataaataatatgtcctcaaccaatagccaaaatattttactgtgctttacactaaagttgccaacataagatacctactatcattattttaagtgtttctcataaagtacctacagatggcttatgtcttagttcattctgtgctgctataacagaatatccgagactgggtagtttataaagaacataaatttatttattatagttctggaggcaggaaagtccaagattaaggcaccagcatctgggtctggtgagggctttcttgcagcatcctcacatggcagagggaaagctacaaaaaactccttccatcaagcaagcccttttataaggacgtgtaataccattctcaagggaggaaccctcaagacctactcacctcctaaagggcccgcctcttaatactatcacactggcaacacctgaattttggaggggacacattcgtaccatagcatcttaaaaagagtacagatggctaaataaggaaaatctataatcccctgctcagcctcttcctactcacccttccctttaatcccctttccagtttctaataatcatagcactattttaatttctctattattatcttcatatacttaaaatacttttcatacacatgaaattatttttcctattttaccaaatatagactgtcttgattcttcactgtataattaggcaaacagttctctagcattcttagtaaataaattgttattcagtgtgtagaatcttgataaatgctaattgtgtttagtaataaattgcatcctaattttatttttaaacaaatttgtatttaatgcctgttgctttgaaactttcatacagagtatatacaactttttttccctaccagagaccaacagtgataataactaaatttaaaaataagaaggtttttaacttttatttcaagtttttatttaacaggacaaaaatataaaataggagtatatttctctgttcttgaaattcagaaaatatggaattagaataaaatatttttaaaaatcagtcacataatagcatttcagagaaatggggaaatgggaaatgatgaaataaataacataaacatattgactcatgctttcttagagggtagaatgatataagttcaaaaagttccagagaagatgaccacacaaactgaacaaaatgtaagtacataggacatgaagaaagatatcatggtaactctataagttcattttaatatttccttgagaaaacaaataattgttccatactttaattgatttgagaacaccaaatttaaaatattggatttataaaaagtcagtaaaattatatttgtattttgggaaaatgaaaaagaaataaaaaagttgtcactctccaaaaaaaaaaaaaaaa

SEQ ID NO: 58132 - DNA, 2621 bp, Homo Sapiens
gcctactggccgacagactttttgggtaagtctgggtaaaccgtggggtgatgatacatttgcttctcccatctccagaacttcccttaagagtcatccagctcttgctcagtgaagaggaaaatgcctccatggcagaggtcaacgcctcggtcagtgctgcaggccgcgctctgggtgggagggggcgcttggcgggttcaggccagggcggaaccatcgctgtgcggccttcatcttgtcatccatctggattcaactgccagaggaggccggagcctcttgccccatgggaggtgcagggcattaggaagtgaggaaggcccaggacagaaacctcgactcatcataagcagaggccagggtgccaagtcaccccagccgagacctctaagcatcttggttatgatctgaaagaaactaaaggacatttcacctcccgggagtcttccctgacttcccagagggaacgggcggctccctcttcttggctgccatgccatacctcagtcacaggcaaagtggcacaactgccgagtggttggggctgtagaatcctgcacacccagaatcagaatccctgctctgcccctcactagagcaggtgtgctaactagacacatcatataacaggtcatctgtaaacacagggacaatcatagcacctgagtcaacaggccgtatcaccgtttaaatgataatgcgtgtcaagcatttagtccagtgcctgacacacaagtattcaaacatgatgactgctattatcactactgcaagcctagcactccccactccacactccacacggtaaaatctgttgacatttgtcacctgcgccagacaatgcactctttgagtttagactccacctaagtcaccttgacacccccagccccgaccatctcctaggtctaaacaacccatgttcaatatactggggaggaggtcatgagtcatgtgtcagaggcaaggtaggggccattcatgtcagattctctgctcgtcatatgaggctgagggggggacagaatggaaaacccttcactctcaacaaacattattaagcaaggacccatgacactcactgagctaggctagagtgcaagggtgcagagacaggtgaggaaggtgctggggtcctggggctcccgttccaggaggaaacagggatgaatacacccatcaaggtgggagggcgtctcccccctggatggggcctcacccccacccccatctgccatcctctaacctaggtggcatacagactggggaccctggacatgcgggcctttctccgcaacagccaagtggaacgaatcgattctgcagcaccggcctcgggaagccccatccaacactggatggtcatctcggagttccagtaccgccctcggggcccggtcattgacttcctgacaaccagctgctggccgcggtggtggaggcgttcttataccacgttccacggaggagtgaggagcccaggaacgacgtggtcttccagcccatctccggggaagacgtgcgcgatgtgacagcccgtgagtccgtccattccggggacactatgggggtcactgcggggggtgggcaaacagaggtgcttcagccaacacaaacaagctaattgagtttttctgtttgtttggttttgagcgaaaacgtgaacattttgtccagctgctttttagattcgagagcaggagcagccagcactgctgaggcagtcacacgtatacagcttcacggagcaagcacccagccagggccttgctgactgtggctgctaataaaacagcagcaatttagtttcataaaattgctaatagttttcttaaaatgccattgcacttaagcatacacagggacacccccatcgtctctgctctccagtgggaggatatgaagctggagactggagactggccagggacagaggcaactactccctgaaatggtgtcaccctgtgcaagcaccttccccaggccaggccaggcctcaacaccccccagcaccttccccaggccaggcctcaacaccccccagcaccttccccagggcaggcctcaacaccccccagcaccttccccaggccaggcctcaacactccccaagcaccttccccaggccaggcctcagcacacccatctgaaaatgagatgggatttctgagccccctttcagtgctgacagcccccggttttcccggaacaggaataagttggcaagcttgtcagagaaacaaaggaataacacgtcctattttctgtatagggcagagaacagggcaggggccgccccaaacacaacagaaactgctgttttacttgggtctgggaccaagcaagagcttctcccagaatccagactaagcccgctctctcccggagcagggggtgaaatccctcagaactactgtatgttggggagttggggtaggaggcgcagggaggcaagccctgactatgcaattaaggaaaacctgtaatttttattatacaagcatcgtatgtttattgcagaaactttaggaaacacaaacttaacaaaaaaaaaaaaaaaaaaaaaaaaaaaaaaaaaaaaaaaaaaaaaaaaaaaaaaaaaaaaaaaaaaaaaaaaa

SEQ ID NO: 58133 - DNA, 986 bp, Homo Sapiens
agcgggctgaggcaggagaatcactcgaggttcttgaatcacttgaggcagaggttgcggtgagccaagatcacgccaatgcattccagcctgggcgacagagcaagactccgtctcaaaacaaaacaaagaaaaggccgggagcagtggctcacgcctgtaatcccaacactttgggagatcaaggcaggcagatcacctgagtttgggagttcaagaccagcctgaccaacattgttagtagagcaaaacgtcgtctctactaaaaatacaaaaattgggcaggcttggtggcgtgtgactgtagtcctagctactcgggaggctgaggcaggagaattgcttgaacctggaaggtggagggtgcagtgagccgagatcgtaccactgcactccagcctgagcgacagagtgagtctccatctcaaaacataaataaataaaataaaataaaggaactctaggagtggtcaagtaaaagtatagagcagggatgggatggatgaggttatggactaaattgtatcttcccacctccctcccaaatgcagaggttgaagccctgactcccagcgtgagtgtttttggaggtaggcccttgagggaggtaattaaggttaaatgagatcttaagggtggggccccctactctgagaggactggtatcccaataagaagagagaggccggggcttgtggctcatgcctgtaatcccagcgctttgggaggccaaggcaggaggatcgcttgaggccaggagctcaagaccagcctgggcaacatagtgagaccccatctctacaaaaaaaatcagaaaagtagctgggcacaggggcacgcacctgtagccccagctactcaggaggctgaggcgggaggatcgcatgagcctgggaggttgagactgcgatgagccgggattgtgccactgcactccagcctgagcaagagagacagaccttgtctcagagaaaaaaaaaaaaaaa

SEQ ID NO: 58134 - DNA, 2124 bp, Homo Sapiens
ggctccgctttgcctgggaccaggaaaagacgcgagagacggaactcggcatcaggcactgcttggggcaggaggagagtaggggaaaccaaggaagagaacagaaaggtaagcaccagccacaaaaacctacaaaagaagggaaattactgtctttaaatattaaaaaaaaacaagatccatgagtgggcatcgatcaacaaggaaaagatgtggagattctcacccggagtccccagtgggcttcgggcatatgagtactacaggatgtgtattaaataaattgtttcagttaccaacaccaccattgtcaagacaccaactaaagcggctagaagaacacagatatcaaagtgctggacggtccctgcttgagcccttaatgcaagggtattgggaatggctcgttagaagagttccctcctggattgccccaaatctcatcaccatcattggactgtcaataaacatctgtacaactattttgttagtcttctactgccctacagctacagagcaggcacctctgtgggcatatattgcttgtgcctgtggccttttcatttaccagtctttggatgctattgatgggaaacaggcaagaagaaccaatagtagttctcctctgggagaactttttgatcatggctgtgattcactatcaacaggtattgttgatttttttaatgttattgattattaacaatggttaaaccagtgtgctaagcagtgttagaatacatgtttagtcatgagaataagtaattttgtattaaattttagtatttctcaaaagactatgaacctagttaatatttgttcattattggtagtgttaggaaatttagaaattactttctgcttgttatttttagccccaaatattgttttggcatcttttgtttttaaaagcttggggcataattgtcaccatcaaaactcttatgaactaaatgagagtacagtggtgggagactagttaggtaatttgtggtcttcatatatttaaatgaatgttatgtagacattcagaattatgttaatggacttggattataactacgtcataagaagctcagagaaagactatgacaaattaggagtatcgttaatattgcattgtgtactggaaatttgctaagagagtacattttagatgcttttaccacaggagaaaaaaggtaactatgggacatgatggataggttaatttgcttaactatagtaatcatttatatatatggcatgttttacacctcatatacaatttttaaaagaaacactaaagtgctagcaataactgagttactctgtttggattataagtgatatctctttatttgcactgttttgcaagtttttaaaatagtagtttattatgtttttagagaggaaaaagacacttaaaatctaaatgacagtttttcagctagtctttctgacaggaactcatccctcccctcttttatttttgttttatttagtttctcaattattttcttgtttgacatggcacttaaaatatttaaaaagaaactaacaaaaaccccttatagttttacctcctgaatccacatttacaggtataggtgcatatcaaaatcattgcttcattgtatcccaacagcagcttatttagtagaggaggagaagcaactaaggtcatataattttttaagagtcaaatcaagaaatactcaaaacttctgttgaataaatggtagttggctgtcttgaaaggcaacaaccagctgactgcaggatggcaggatggcaggcttcctattatttattttaaattgcagtcatttttgcgttgtagtttgaggtctagacttttataggaagtctttttctatgtatgtcacccataacaatatctgtttaaaaaaaaaaagacagttatcaatctgaagcaagtaagtcggtccgtctggggattatatagcccctttgtttttcttttttggctgtctgccttgtaatgatttgctgatcattagtactagtgtctctaagtcaggaaaatactcgaagaaatgttgaagtattttagttgccttcaagaactttgcttccactaagtgatttggtaaaaaaaaaaaaaaaaaaaaaaaaaaaaaa

SEQ ID NO: 58135 - DNA, 1184 bp, Homo Sapiens
agcggaaaagattaactgtgaactatgtgccaaattaaagtcaccttaaagtttctagatttaagggtttgttgtacaaggaatcagaagaaattattctctgcagtttgtcaattaccacaaccaaatttaaaatcaaatttagtttatttggaatggtttactttacttggttgaaatcatccttatcttctagaacagttgtggtaaatcaatctgtaataatttttattccaatatcttattctaactgtaaaattacttgagtgaatgaaaccctgccttctttagaactatatatggtttaaaatatgctgatttttaaaaacctctctcttagagacagtagagtaataaccggctacttgatgagaaaattctcttaatcaaacccttgttcttcatgctacacctaaagccaccctttcctgacaaatgtgtcatattttggggtagaacaaagatacctgaggcatgatgcatggcctacctcaacagatgacactgctgacagtcactttattcatctttcagtggctctctcaaataactgtctataattaaatatgctcattaatcttaaatagaggacctcctgggcaaatcaaatttcttgtctgatccatttttgtctagtctcataacacaaaaaaatcagatacaaaataatattttatttcagaaggaaattttgaatcttgaaatgatttatttatggtataagtggtattaattttttgcaacgtgttgatcttcagcatctagtttctcactgaaatagattcaagttgtgatcacatagttaagtgagacaatgacagatttttaggtttttagggtaaaagaaaacttcatcaccaaaatcaatttaaagggatgcttaagctgctgattgtgaagtgaaacaactcaagagtatcctggatgttcggataaatttactagtttttcatggacttgaaaaaataaaataaacattcgttttatccttataaagatggagaagaaaaatacaaaaatcagctgggtgtggtggcaggcacctgtagtcccagctactggggaggctgaggcaagagaatcgcttgaaccctggaggtggaggttgtggtgagccgagatgttgccattgcactccagcctgagcaacaagagtgaaactttgtctcaaaaaaaaaaaaaaa

SEQ ID NO: 58136 - DNA, 118 bp, Homo Sapiens
gctgtttctgcttgctgatccggactgcacacagagaacacaccatggagtttggactgagctgggttctccttgcaggaatattaaaagggagtgcatccgccccaacccttttccc

SEQ ID NO: 58137 - DNA, 2393 bp, Homo Sapiens
agcggtggatcatgagcatattatgttctttgcatttaacctacccctaaatatttgagaaaatacatcttgggtaatataaagagttgatttagtctatgcttaatatttatttagtaatgaatattgttgctatgaaaaagttgtactacttgaactttatgtctgtaatttacatgtttaatatttttaaaactccttgcctttattcatgtatccataaattcattcaaacattcttttatttatatttactgagtaactactatgtgcaagcattggtttgtatattagaaatatggtgataagtgaaacagaatgattctttcttttgtatagattatattttgcttttctttcagggtgtgcagcttcagaaaacataaaaaattttaaaaaccagtagtctttgtcagttgccatggttcttctcttagactttgttatcgtactgaataataaaatcatgcattcagatttttatgtcagtaactgctatggtagtagagatataagtattttctgatatataatctttatagttaaatgaaggtttctgagagtatggttttaaaaatattaactttgtaatcagcaggcagaaaaatcaaatgaacaaattgttctttgtgattttgtcttataaataccttttattggtttttaaagctatataattgtcccttgaagtggtttgaacttactgcaaaatagcttggtactttgattttttcctttgaaagattattgctaaacatataaagtagaggagacaattctgacagttttagatttgacttttgattgttttagatgacacttggtcataatattatggtgcttgatatattattcaaattgcttcttctttacctttaggatggattttgccattagtaaactgaagaaagcaggtaatcagactggactgtatgtacttcgatgcagtcctaaggactttaataaatattttttgacttttgctgtcgaggttagtatgtcacacttattagtggtaacactttatttagttcatttaatttcctctccatatttatttaccatatttcctttttaatactgagaattatagctttggatatgataactagtataatgcttaatttcctcagagattctgtacaaataaacaagttataattcccagggtttatataaaaatataaaataatttataatgtctatctttttattttgcatttattttattttctgatgttttggtgttaccagtgtgttaaaaggtatttcatcaagtgtcttgatgtttctttgtttgcaaaactggaaatctttgccacatcatgtagaacaaaataaatcggaagcaaattttctgtttattaacagtggttgcagaattagaggaaacagaattagagaaaactaggtcaataacaaacaaatagaaacattaaagcacttttaactgatgattttctaatatttttaagaatagtggtctacaatgcatgtttcaacggtaaaactgcaatgaaaccccactgttaatacagatcattttggatctcatctatgattatatactatcacttatgaggcaatttcatggtataaatcctaagaaactatagaagcttgcaaatttatcttgcttttttaaaacagagaaaaataagaactttgttattcaattattttaatttttataaaatgcaacttatatttggcatatgtagagggtagattacttacagaagggaggttatgccatcactttacctttgtgtaaaactggtaatctatcctaatttcaaagtatcctgttactataacagataatagtacattatattcaagtatgaattcaaaaaaatatatatatatattttatgttcactgtatgtgccaagcctaatatgagagctatgtattatagagtttatgctacagccctaccttcaggaaacttatctactggacaaacaaaaattttcaaatatacaaaaaattctaaatcgaacattgtaattatctagcataggcaaatatagacagtaacagacaggtttacaattattaagaaagggcagccaggtgtggtggctcacacctgtaataccagcactttaggaggccaaggcgggtggatcacgaggtcaagagattgagaccatcctggccaatgtggtgaaatggtgaaaccctgtctctaccaaaattacaaaaattagctgggcatggtggtgcgcacctgtagtcccagctactcgggaggctgaggtaggagaagcgcttgaacccgggaggtggaggttgcagtgagtcaagattgtgccattgcactccagcctggcgacagagcgagacacggtctcaaaaaaaaaacaacaacaaaaaaaaaaaaaaaa

SEQ ID NO: 58138 - DNA, 2355 bp, Homo Sapiens
aaaaatcgtgctttgcaagatcgttcatatatttgagaatacaccttatgacctgcttgttctctgtactgtttttagtgactttgaaggtaaatccagagtatacttagaggatacaagcaagtaactatttctctagaagtgacattggtgatcactcatgctcaaagagaattgcatttcattgcttcctctttcagttcctgtgaacatgactttgtcccaatcaaaaaatgtaatttattttcaaatcactgggaaaatattggtctagatgagaatataagcctttttccctcctctataaatagaaaattaaacattaaggggaagaaccttatgtgctgtgaactaaggggtttaatttaaccttctgtatctgaggtctagagaaagagaaataatgacagtttacaactgtgtgccgagctgttgtgcttaaatgtgtttttgacagaggtggcagtgaaaactaggctatttttcttttttaaaaaatggtacaagcttttaattggtttatgtaaaagaaaataggcaagatatacttttaattctaacaatagttttagtagatactctgataggaaatataatattcctcggaaatgtagaagacataccctaaaaaaagttatgatttagtattttacgaatcgtcctagctactacagggagattaagaactcttccgtaacttaaatctggtttcagcaaagtgatttgtacactaaatgtaatttgtttgcactcttcttccaggacattctgctttttgggctttctccttcctaattgctttgttcattctatcttacatcttctactcttaaacttgacatgctcagtccttgtttcacttttctttttatattcctctgacaatcttatccagtgtcatggttttaaatacctatatgctgatggctcccatatttatatctccaacccagactttccacatgtgctgttaggcctatccacttggatgtgcagtagtcaactccaactaaatttccgtatttttcctcaaacatgtttgatgtttgatgtttccatcaaacattcaggtaaaaacacgttggagtcatccctgacttatttctttcacacttggcattctgtgctctgtcttatcttgaaaatataaccagaatccaatcagtacttactgcttccactgctcaccagcctggtgcaagccattcttatctcttacctagatttctgcaattagcctcctaactgatctccctgcctctgccctaactccctgcagtctttccaacacaacaactggatcatattacttatcttctcagaatgctacagtgactttctctatgcacagtgaaagctgaagttcttatgtccttaaggccatgcagaatctggacacttccactctcctcattcccccttacctctaaggttagctactatcatccctctgcttacttctctctggctccaatggttttcctaagggcagctacatatcagacactgccctaaacgcttaggctccatcaataaacaaaacagacgaaaagctctgccctgatagaagttgcgtaatagtgtatgtttgagggcaaggggaagagataataaacacaatcaatgaggaaattatatactgtttacttctcctggcaagaaggtgacaagtgccatggaggaaacagagctgttttttacactggctgttaccctgtagatacatgcatggcttgttgtctccgtccagtctttgctttttaaatgtcagtttcttaaaaagatgtgcctattttatttaaaactgcactcccctacgtctgattcttgtaccttgctccgttttctttatagcatttgtcaccttctgtcatactatataatttcctggttgtgtttattgtctcttccacataaccctcaaacacagtattacatagcttctatgagggtaggctttttgtctgttttattgatgactctttaagagttcagagcagtgtctagcacatagcaggtcctcaataagaatttgttgaacacaataattaaatcctggctgggtgtgatgacccacatctgtaatgccagcactttgggaggccaaggtgtgtggattgcttgagcccagcagtttgggaccagcctgggcaacgtggcaaaaccccatctttaaaaagaatataaaaatagccaggcatggtagcgtgtgcctgtggtcccggcttcttgggaggctgaggtgggaggattgcttgagccagggaggtggaggttgcagtgagctgagatggtgcgactgcactccagcctgggtgacagagtgagactgtgtctcaaaaaaaaaaaaaaaaa

SEQ ID NO: 58139 - DNA, 496 bp, Homo Sapiens
  misc_feature (402)..(402): n is a, c, g, or t
  misc_feature (405)..(405): n is a, c, g, or t
  misc_feature (413)..(413): n is a, c, g, or t
  misc_feature (459)..(459): n is a, c, g, or t
  misc_feature (461)..(462): n is a, c, g, or t
  misc_feature (464)..(464): n is a, c, g, or t
  misc_feature (471)..(471): n is a, c, g, or t
gcacgagaaaaaaagtcccactgacgaattggaatatatcctgaggaactgaacgggtgataggccgagacacagtctgatgagggtgaatgtctgaaagactcaggggatttggcttggtgaaggaaacccagacagagacatgtggcaattttcaagaactgacaacgctgtcagccggaatacaggtttattctatgttgctccagaggccaaaagtaagaataacgtgtagaattacaaggaggcagatgagatttcatatcaaaaagaaaattaatcgttcacggtacctggaaatgaggtggtccacgctgtgctcgcatcggctctcccccagagttttcaagggcaagccagtggcctcgtgtccagttaggacgggtgcagatggggcatggnacngctgtcanatggaatggcttctgccaatgtttaaggactctctgtgaaagacanannanaaaaaanaaaactcgagggggggcccggtacc

SEQ ID NO: 58140 - DNA, 521 bp, Homo Sapiens
  misc_feature (496)..(496): n is a, c, g, or t
gcctctgtctaggctatggaagattaattctgaggacaggctgtatatacacatattgttattgttttagtcagaaactaggatggagctaggtgctgtgactcacacatataatcacagcactttggaaggcccaagtgggacgatgacttgagttcaggagttgaagaccagcctggacaatatggtgaaacccatctttacaaagaatacaaaaaattaggcaggcatggtgctgcatgcctatagtcccaactgctcaggagacttaggtgggaggatcggctgagacgatcctcccacgctcgttcactcctctcaggctagactctctctccttttcattggcttgtcttagctattaataagaagtctcggcctggcgcggtggctcacacatgtaatccgagcactttgggaggccggggcgggtggatcacgaggtcaggagatcgagaccatcctggctaacacggtgaaacgccgtctttactanaaatacaaaaaaaaaaaaaaaaaaa

SEQ ID NO: 58141 - DNA, 1325 bp, Homo Sapiens
caaggcaaattagtgatagtacattttttaaaactttgtattttccttgtgcctcaacatccccacaaacaggccgtgaacactctgccctggcaaccagatgcaccagtatgataaggctggtccctgccacaagttccccttcataaccttccctggcagtgccctagtgaaatttaacgaaatcacctcatgccttttgtttgtgtatcctgacccccaatacaagcatttgcctacaggtcctcactctatcagttatacctatttggctgaacccattctttgggcttctcccatatggttccctgcatggtgtaccttgcctccctctctaggacctttgagtataataaatcctttaatttcatttacctctccaagtataattcccacagctatgttggagtgatccttgaggaccccacagggagacttactccctcccccatttaccacacagagagttatagatgataagctgattattggtggttgttgccatcagcagtcaaagaaaagagaatgcccagggtttttttgtttgtttgtttgtttcagaggatagagaagaaaggcattttgagtttcatgggacaagagtcatttgaaatgactctataaatagtgtgtcttaccatatgtgatatattcagtgattaagaaaaactaaacctaaatctgatcaagactctagctccaactgccagtttgcaggacatacaaagaactaggcacatattctaaatgatgtgatggggatacaaccagcaaaatccagaatgtggaagattctacaggacatacaacccagtttctttagcaattaaattagaaggggaaaaaaaggaaaggggatgggggaaatcctataaattaaaagagatttaagagttatgtcggccaggcgtggtggctcacacctgtaatcctagcattttgggaggccaaagtgggcagatcacttgaggtcaggagttcgaacctagcttggccatcatggtgaaaccctgtctctactaaaaatacaaaaaattagctgggcttggtggtgcacacctgtaatcccagctacttgggaggctgaggcaggaaaatcgcttgaacccgggaggcagaggttgcagtgaaccaagatcatgccaccacactccagcctgggtgacacagcgagactccatctcaaaaagaaaaaaagagagagagatgtcaactaaatataatgtatgaaccttgtatgaatcttcattcaaacaattcaactgtaaaataaatttggaacaatggaaaattttaaaaaaaaaaaaaaaaaaaaaaaaaaaaaa

SEQ ID NO: 58142 - DNA, 616 bp, Homo Sapiens
ggaagctgagaaaagtgacatctgcctctgaaatagttctgggaacgtcactggagggtgactgccaggttcactcatgccatcagccccgcctttgtgtcctcagtaatttttactctgagcataatcacagccctcgttgagaggagccactgtccctgttggtcttctttctagaagtatctcttatatactgatatacagcagtgcatttacattgttaactgtaaaaatgacaccaacacatttagaaaggccaccagataaaataaagaaaaatgtatccctcaacgctgacatacttactggcttgcttttggaacgttcttctttctgtcttcaggtgctagaactttaggagagtaagtgggctctgttgagggactctgaagactggtcacccccccgcccacacacacacacacatcccccagcacttgagctgcgcttccacataaccacttcctttatgctgggactgtggtttctttgtgtgtttttatgtcttttccatgtctgggtctgggtttgcctcccctgagagaccgtaaacttctaaagaacaagaactgtgttgtctccttttataggagtgtatgtttcattaaaaaaaaaa

SEQ ID NO: 58143 - DNA, 534 bp, Homo Sapiens
taagtatcctgtggagagttactctactaaaaatacaaaaattagctgggtgtggtagctcacacttgtgatcccagctacttgggaggctgagacaggagaatctcttgaacctttgcctcccagtctcaagcagttccactgcctcaacctcccaagtagctgggattacatgtgtgcaccaccatgtttttgttttttcagtagagacagggtttcaccatgttggccagactggtctcgaactcctaatctcaggtgatcggcccacttcggcctcccaaagtgccaggattacaggcgtgagccaccaaaccctgccaaatatcctgtttctcatgaaactttcaccttctggttttatagccaaagtctaagcagaagcccctgcgaccattccaacactgacagaacattcctctgccttgttttacagatacattggggaaacttaaggatgagaactttagaaatggtatttcttggaaacccacttgcttgtaaatcagtggttgaaagaaaagaaaaaaaaaa

SEQ ID NO: 58144 - DNA, 3578 bp, Homo Sapiens
ggaaattagaatctatccttaaaataacaaaacccttacaacttgacatttttaacttgtctattatgctttatagtgccttagattttactaaaagtcacctatcgaataattaattaatttattcatccagtaaaccttcatgctactagatggagggatggcttttaaatcccaggaggaataagttcagactctgtgctcaaggtctcgtagtctagagggaaggccactatacgaaaaaataattataatgtactataatgtaagtactgagtttagctatatatgaagtgctttcagagtttgaaaggaaaaggaagtacctctacctggggagtaatatttttctatagttcagtagggacaaaacttatagcaaattgctacttttattgctgtatattatatggtcatttattgtcatatatgtttgatgctgttctctgtgtaactattgtgaaaaagatgcattcttcaatcccaggggaaatattcagagactagtgtttggtttgctgataaacaagccattgctggagcatattcctatttgcaactctacctcttagcttcatggattatttgacatttatgtttatggttctgtgccattatactatcatgcagcatttcacttaagtcaatgaaggatataagtaatttttctagtttattaaaaatagatttcaacatatatccactgtgtacctacatgccttttaaacctctgatctaaagtctcaccagtgaaagctgaataactagaatggagaaaagagtaattatgagtctctctgtgtctcagttaccccctctgtaaaatgggagaggttgtactatctaccagacaggctgctttgaggattaaatgaattatttatataaagtgtgtttatagcagatgctatataagtgttagctgacgctattgttgttgttattaaagatagtattataaatggtgtgtcattgatttcagaaggacagctggaaactatactgttgattgaattttcttatgtgtcttttataactttaatttttatgggctttgcttttcatttttcccccaagaatcagatatctgccagagtagacctttgcatttgcagcctgacattgtgcattattctaatggaatagcttaggataggttgtaaattcttagatcaaatcttcatgttctgacactagcatacacataagcacatgcacacacacacctctttaaggtttaggtaaaagatcttgaccttccccacctggcttcagtcaatccaaagatgaacagaatgaagaaataactccttaaagacaaagaatctttcaccacttaaaacttaccttttaatattctttactagattgtcttccttttttgatctaggttaaatttatattcaaaaccttggtccaagctcttattcaaatattttagttcatgccactcttctcatccctaaactctctaatttgattggatattctatagtgcagttttccaatgcatgctgaatttctccccatctacattcctaccttcttgagggttgagaccatgcctttccctttggtattccccacaggacatgatatagtggctggttttataaattattgttgttttacacacttcacagactaatactctttgaggagcttccctgctaattccccaacccactaaatgaaggaaatctatttgaaggaaccttcatattgcacttattataatgacatagtaacaatcatttgcagcacttttgcatttactcagatatcatctcttcctggaagcctttcttgaatatctgatttcctctgaattgccttattctctatttcccaaagtaccctgtgaataccattatcttagcattttccatattatatcgacattatctataatatttattgtgtctgtctcatccattctagaaataggatctttgtttactcattttttgtatctccagcacccagccctgtccctagtgctcaattaatgcttgttaaaactgaatgactgtatcttgccagctccatctccttcagtggaaggaggagaaaattttataactgtatttaggtacaagaaatcacagaagaactaaaaaaaaaaaacctagattttttattctccttgtcttcaataaacaccagtttcctcactgacataggtatccaaaataaaaacaattaaaaatgaaacacagaaccccacaacttctaacagtgatcagttaaaattgtaaggttttactgaaatgtttagagatgaaataacttgatttctggggaagtggaagtggaggggtaaaactggtcatgagttgataatagatgaaactgagtgatggttcctgagagtgagtggggttaatttatactattctacttttgtatatgtttgaagttttccttaataaggagtttttaaaataaaactttcagattttagatgttagtataagatttttttttcagagtatatcatctctcaattttggtcttgtagctgaatgggtatttcttacttcaaatgaaaagtaaaaagccaacttaaatttgaaattctttggcattggaatggctgagttagtttcttattttgcccttagccattttttgaaattattttttaaatttaagaaaaactacttacatgtgacaaattacattgtttggtggtatttgttatgtgtcttgcaattagaaggaagctatcaaatgtggttttgttatgtgatgtttaggccactggaccacagtcagaagatgtgatggattatactctattcatgttcttgcccagtccccaagagcaatcagagtagctagaccatatcaagaccagagtaatgtgctaagagacattcctatttgacataccaccaatcacattgctttttgagtttatttttcttcaacagtaaggatgagttggtatctagctaaccatcttgatccgttataccttttataccatcagtcagcatttatgagactaccaggtgtgcttaaggcacaattgtttgttttagaatataatttttttatttatgttaaactagcacattgaacccacagctttgatttcatagaagcagagtatactttcctccacaaacttagacatgtttcttgggttctttctctctaagcagtgattctcccagccttcacatctacttactcggatgctccattgactgctcaaagcctgttaacttatgaactcaaaagcataatatgggattccaagtttggatgggcattgctggccttccttttaagatgtaacgaagggaatcttactgtcatcttcagggttttctgtttgtttgccttacgccctacggtattcttcaaaggctagtcccttgacagcataataaacctgagaaggtacaaagaaaactatcagttaaataagcatactgacaatctattgagcaaagaaggaacagcagtacatctttgtttccctatttaatttaaggcttctactagttgttcccctttgtattagaaatcctaaatatatatcctctataaaaaaaaaaaaaaaaaaa

SEQ ID NO: 58145 - DNA, 602 bp, Homo Sapiens
gtcgggtgcctgattaaaatgcctactggaaatcagatgtccatgagttcaaggtcatggccttagacttggctgttgtaagggcaaatacaaattagaaataccagacttaaattatgaaacttgaagataaaaaaagacattttactctccttttaaaaaataatttaagaaaacttttatatgtaaatttattttgtgtctctattaaatgtatgtacatcatttaaataggtaaataggactttgtcagcctttttaacttagaaatgtctttctctaggacctggaaaccattgcattgaaatgtaaatggattacctttctgtcctacagtaggtaacttcataaaatattatgaagccaaggaaatcttattttgcttttgaatatagccaatttaaattttcattgaatatacccaatatacatataggcttctcaattacccggttaatttaagatgaactatatatgacaaattatgctgttaagtcttctacttaaagactaaatatggtgatttttatctctgcttttgtaatctcagcagattgcctatgatgggtatcacattgtggtttaattatgtaaaaaaaaaa

SEQ ID NO: 58146 - DNA, 6233 bp, Homo Sapiens
gtccccaactctgccatgaaggtcagcagagtgtgatgtggcactttgcagagatggatgagacttccaaggctgaggacaaggaagagcatacctgcagtccttttcaatcgcccatcatgggactattagcttgagcgttctggaaaatattattacccccagggcgccatgtaactccctggctcctgataagctgccaacatggctttctctgggctgcaaagttggagctcccctggcagggtgccagggttttaagaaggctctgggggcccaaggtagcctcctggtgcaagttaacattcattgtaaaacccgattcaggaaaaaaaaaaaaaaaaaagaaagaaaaaaacccttcccttgctttcccctctgcacagagctagctggcatacaattaatatctgtgctggcacgttgccccttattttaggggctggcttttgctttgggatggcatggagaaggggattatttgcactgtagcttttgatgtaagccatcattgtcatattatatgaatagcaccgcgtaaggatggctggggacaaagaccagtcctccatcccttcctcacactgccctatgtaacccaagtccttgtcacaaaagggctgtctgattttttttcccctttaaaatcttatggaaaatagtggccttagttggaaaccttaatttttaaaaagcatcctttaatttgggcattgcgaaacgttaaaaattggaaaagttgtttttttcagagataatttacacgtttgtacacagaaatgctgcacacatatgcttataatcatatttataattactttttctttgttgcaatttaaaaaacgtacacttagttatgaggtcttaaggaatgctaacattgcatatgtagtcatagaagaaaaaggcatcacataaattttggtaattcagaatggaagcctatatcatgaaaataccaaaaccataaaatctacttacttgaggaaaactgatttgagaatatctggcatgtttcttagctcactaagtttagtgtttataaaacaaatagaagataatgtttttagtagactctgggtgtccgtatacatatgtgtaactatacatatttaggctttatcataatgtttgaatggagaatgcttaatgtagtaatatagcaacatagcaaaaattctaaacttcaaatatacaattcaaacagttgtcacagataaaggctagataaggagaaaaaaatgtatttatgaggcaactcattaaataactcagcattcttagctctgtgatgcattgggagttgtagggaagggagttgggagctgaggaagtagaagtggtatttagtcatatttctgaaactattctggatttttgttttgtcaggagaaagatgcaacaaatatttatagggcctcccattttttttttgcaagaggagagcagaggacatagcaatgaacaagagagaaggtatcattgccccccatggaaactgggtttttataagggagacatataaaaaatattttggggttcaaggatgtaacctgatggggaatagtgatatttttgaaaagctgatcatgacttgtaaagttcaatttcagagtactgatgagaagaaccatgaaatattgtaatttttctaattaacataacacctggaaatttctaagcaaatgccattggaaactaataatatttggtcctaatattgaagtcgtatctattcaactcactgacgattcacattttcagttactgtctgaagtttgaccagatagggaagatcaaggggttccttaaaagaatgttaagtaacaaccccaaagtaatgttttagctttcaaaatactgaaagaggtttaaggtgttatcttgtccaccttgttaatcatataaattctattatccctttaacatgtctagccaatgaagtcagtgttttccatctgcagtcaattgggtattgacaaggaataagaaaggatttctaaaatacatttttttcaagctaatttcagctattattattattattttttaatctctaagtcatgctgttactatttcgtcacccagcatgtttccattaaggcaatcacattaggttgggttgacccagtaaaactttccaaggtttatcaaccaccaggccaattcagactgcagccaaagctatgttctcatctttggtgggctggtcaaagtgaacctttggatctgataaaaccaagtacatactcccatgctatagtgttttcactaaaacacttttagttttataatttaaaattgtacctcatggcattggaggtgattagacttttcctacagatggaactgtgtgttggatctgatttttagttgggcagcaaacctacccagaaccatctacttgcccagttttatccttacccacggccgcctcatatttctacagcactttatgtttcacagtaattttccctccttgattctacaacttctacccctagaaacctgtgttattttcatcccttacagaatcacagatctgtgagcggaacgttgtgttcacaaaatactgttgattattttaccacttcaatggttgtttcagacaaccacccttttcttttcattattgcttaaatatatcagtgcatggtgtcatgggttacagctaataaaaatcccactcgagtgactgcagcctggcttggtgggaagtgacactgcgagctgcaggccgactctgaagaggcaggttttagatgtgccatgatgccagggattgatcttggctctgcagagtggaggacatagagatgatgcgagcatccctgcctaatggtccccagcagaggatgggtggaaggtgacttccgggttcatgctcaggtggaagccgcctgccctcactgccttcttaccctgtctccgtcacaacctttcctatccttcccagtgaccagccaagggcaagacaagactgcaaattaccatctaaaagtatacttggccccttcaaacagaaaagctccaagtacaggccatggactgacaagctttttagttcttcgaatggtcatttattttcagttagattggcacacatcacgttagtagtgtctagagatgtactggataagtcgtctaaataaaaaactaaattaggatgaaattagaaaaatatataaatatatcagagtttttcagtattgatatccattgtttttatttttgatcaatgaggtataattcacataaataattcaccaattttaagtatacagtttgatgagttttgataaacatttttattttattttacttgtttttttctttcctttttttttgttttttttgagacagagtctctgtcacccaggctggagtgcagtggcatgatctcagctcactgcagcctctgccttccgggttcaagagattcgcctgcctcagcctcctgaatagctgggactgcaggtgcacaccaccatgcccaactgatttttgtatctttagtagagacagggtttcaccatgttggccaggctgatctcgaactcccggcctcaggtgatctgcccgccttggcctcccaaagtgctgggattacaggcgtgagccactgtacctggcctgagttttgacaaatatatgttttcctctctccagtcacaatcccaataaagacaagagcattcccatcacaccgaaaggtctcctcatgcccctttacagtcaaccttccccacctccccccaaccggtgcctggcacccactgatctgctttctgttgctatttataagctcttctagaatttcattctttaaatgaaattatatggaatatagttgtgtcatgcttcatatatatatatatggcttttcatgtgtaatctaaaaataatgctttgagatgtatctacattgttgcttggcttaatagtttgctgtttctgagtagtattttattgtgggaatagaccacaatgtgtttcttcgttcatccattgatgaacatttggatcatttacagtttggggttcttaagaataaagctactgtgaacatttgtgtgcaaatctgtgtgtggcatatattttcacttctcttagataaatatctaggacttgtattcccaagtcatacggtaactctctctctatttggagacagggtctctcaggctggagtgcagtgatacaatcctctagctcactgtagtctcagaatcctgggctcaagctatactgctgcctcagcctcccaagtagatgggattgtaggcatgtgccactatacctggctgatttttattttcaatttttttctagagatgggatctcgccatgttgcccaggctggtctcgaaccccagacctcatgcaattctcccaaagtgccacattataggcatgagccaccacatcctgcaatatatttaatttcataagaaacaaccacaccattttccacagtggttatgcctctaaccccttctggaaggagaccatatcatcttttccatacaggacaaattaaatgaggtattacagatagtgatagaagtaggcatggctgatatataggcttcctgtgcactataaagctgtccatgctcagatgcatagttcaaattaatcattagtcaacctagttaaattgtgcagttattttaaaacaacagaaagctactttgcgaggttacatgtcacagtttctctaacatcctacttgggccacaccttttccaagaaaccttccctaagtaactcatccttacttctcatttcttccactattatttatgtaaattatattgtagacagtatttttgtaactatttagttgtttctagttggtgtgatggcttatttcatgatatgttttggtataggttcaaaattggggaatagttactgggctccatgtaccctgtgtgttcagtacattcttgagtaagcgaacctagtttccagaagctgtagtccagaaaactaccactctctcatctaaaataaaatatcttaaataacacataaggattcccctggcgcaaaccaatcatagacgtacactcgcctgcgatccagtatatgtgtttctgttcatttgcctaaaatgggctccacattcagctccctacctttgagtaaataatcatgcgataaagctcaagaaatacgtggttgtgggttttatttttccacctcggctgctgatgtgttacctagcaggctgtgttctacacagggcttggttctctctcacagcttgtggtaagcgaaattattccaagattcaatgaatacctgctattgagcggcttccctaaccacccaaactggtcttttgttagtggttattgagaggattgtcacagccattgacctacgcaattttacttcaaaagaaatgagcatttttcttcccctttcatttctaaaagcagatatggcaatttgcttaaattgctgtctttaaaagtttagatgattatactttttcccccttgccttttttcttccttttcatttaagcagcacagtgccgtctctttttctgggattggacacggttcctgctgcagggttcatgaagtggttgtgcatgcgtgtgtgtgtgtgtgtgtgtgtgtgtgtgtgtgtatgtatattatctccttacacattagtgttcatttgtctgagaactcttttcagacaaagtaaggctacgttgaactcttcgattaacattttatattttaatgctagggttcattttctctaggccccaatactagaggtttgcgggtgaaaataaaatgaaaatacacctaatggaaaaatctctgtctctttatgtaggaagatatggtagcaactagcctcagagacttaggagtaggcaagataggttacaccttcaagattttatgtctgaagaagaaacagaatttgatctaaatgtaggaagaggaaataaaaggtgcctgtgaagaactaacgctaggaacacagggaagaaagagatgaagatgaaaggttacggctagttggcagaggccaagagagcatcctattcttagacccagcaccttggatctagtttccctgtgttgcagttatctctactatgatgtgcaacaaaccatactgagccatatacttgatgccatatactttatacgtgccaaagaatatgatgcaataaatacattttaaattatagtatgaaaaaaaaaaaaaaaaaa

SEQ ID NO: 58147 - DNA, 4355 bp, Homo Sapiens
atagcctgaggctcccccaggccgggcagatcgggaggcctgcccccgcccctccctccctcagccccagccctgtccgctgggtatgggggcaccatgggaaggggaggaggcgccttgggcaggactctgcagaagggccaccggggtctggccttggctttctgcagtcaccacaatgggtcctttgtggggtccagctgcctcatggtctaggttgcatggggcattctggaagcctgcgggggaagagatctccaccagaggttcccttgaggtgtggagccccaggggatgtcctggcctgaggcagccacacttggtgtctggctgggaaaagagcagggctttaatgcagggaggagctggattagaatcctggctctgccctttctactgaacagctcggtatattctagaagttaggggcaaaggctctgggttcagaactccctgtcgccgctcggctggctgacctcagcaagtctccgagcgccctcagtttcaccacctgcaaattggggctaaaaataaggtctccgcttgtgacgactgagtgcgtgaaacacccttagcagagtctggcatgatttagagctcagaaatagggcattagtggatggggggtgttctccaggaggggttttccacatccacaaaatagtgattcagatgcctgtgccacaggaggtatttcttcccctcttcttgcatgtgaaggcagtgtaaagtgacagtctacccagagagaaaggcccttagcttgccatgacccccatagcatgggatatattggggtttaggcccaaagaggacactggtcttggacctcttgattggttgacatggttttccagcctgtccgggtccctgataccagctagcaaatgtttgccggcttcttgcccctgccgggcagccctgaggctagcagacctaggcagttttgaacaaggacagcccctctgatggaattcaaggtcagtcctaatagcatcagttaagtctgggccataagagctgtggtcggcacatcaatttctggttcacaaagcctccccttacccaggccaaccatagggattcgtgccaccgccgccccctgcccctgtgtgattcagtaggttccggtgattttgagcttgctggggaaattgctgtttttgatcttttaatcctttctccctgcacctcacccttccgtcttaccaaggaggaaatgaggctccagggatgagggccttatcttggactttatgggtgctaaatgggaagggtagacttaggtctcaggtcacacatggctcccaaccttgtgctccttgaattggtggcttgtgggggcaggtaagggaagtaaggaaaatgggtaaggccagctctagcctttggccttggaagggccctgtgtcaggcattgatatttaaagagagaaatgctcagctctgagaagctggctagtctggggctcccttggcatacttcaggtccctgagtgcccaggtgtcagggggcccagcttaactaggaaatactctcagggcttgggctcactgcggaatggtgagaatggattcagtgcttcacgtttgcaccttggaggatgagccatgtgtgcccagcaaacctgcactctttaagctctgtgaacttcaaggctccaggacctgggttctactgagggttcgaccatccccatgcaccttcctccgcttcagtgtgcattcatcaagcattcatcaagtgtccagtccatgctcagccctctgccacaggccccaccgtgaggaggtgggtggcatgtggtccggctctctttgcattccaagagaagggaggagggcttatggggtcccaggagtgggggtgtgcgtgaactggcacgcaaggagcatctaccactgtatacacactttggggtgcagacatcgattcccttgtcacctgagagagggagttttaatcttcattttaaatcaaaggagaggggagctccactgagtagaagccctttgctctggccatgcagtgcatgagctggtggatctgggatttgaacttggggctgttagctccaaagccttagatctgggagaaaagggagagattggaggggcccaccatcctgtcagctcttttaagaattgtggggagtggagaggggtataccgtgattagacctcctcccccagttcaaggccagggagaaaaccagccgtcctgctcgtgttccccttcttaaaatcagaagcaggaaaaatagtgcactcttgcccttccctacggatacttctgattttcttactgcctgtagagcctggtgcaactgagttctgtgttttcctgtctgtgaaatgggaatgaggagagtactcaccgaagtagaacagttgagggatgaggcagtgcggaaagcatttagacacagagtaagcgcctcatccattttggccgccatatttatttgtgtcattttatttaagcacccatcatctcctaacacattatataattcacttaattatcatgctgcttctctctccctcccattagtacatgagctcctgagggcaagaagtttttatcaggcttcttcaaggttgcatctccagcacctagaactgtgcttgagccaaactcgatccttggagatgcctcttgaaatctgtcaaggaagccatagacatgacgtgacttgatatgccagcttcagtgggcagattttcagccattagtggagaaatctcccctctccacccttgaatctgccgttcctaggttgtttttggggttaaggaaggaggcagaacgcaggggagggaggctgagctttcaatgatttattgtgtttgctttgctcttgttaaattgtttcactaatggctggctgttgcagttgtggaactagccttgtgacccacatccgtgtgtgttgtttcgagttccggctggcctggggccagtagcacctgctgccttctgcacaccagcccagggtgggtgaggagggaagataacagcatccggaagccctgtgcccaggcccagtggtgcctgagcactgccttccgggaggtgcaggtggctgctgtcccacagtgacagcccccatgttgaaaacccaaggcctcgggggtgccgctgcactagcactgaccagatgtgctctgggaccattgacttcccctctcggagcctccatttcttcattttaaggaggggatgtaaacttcgctgcctcacctggtagagtagatgtaggggcaagtgtgatcaatgcacacttgcgggatcaatgtgcaatgcaacttgcaatgcaggatcaggcccataatttgtggggcccagtgcaaaatgaaaatgtggagtcccttgttgaaaaagtattaagaatttcaggacggcagcagcagcgcattcagccaagcgtggacccccctctgagtgtgtgaccctgtgtgcctgcacaggtcatgcggccctgatggagctggccctgctgcagggccttggtttggcctctaccatttttcactctggccttctgagtggtctttctccctccaggataccccagacctcctcaggactccctagtgagctttccaaagttgatctgatattttcatgtcctgatttcaaccttcaaatgggtctcattgctctaaggatccagtgtgaattcctttttaaaaaaaaattatatagagatggggtcttgctatgttggccaggttgttcttgaactcctggcctcaagtcatcctccttccttggcctcccaaagtgctaagatcacaggcatgagccactgcacctggcccagtcttaattccttaggccccaatagggaatgggaccctggtagccccatcagttcctacaccaagctaagcctcagccaccacagggacctctgagcacagagttaacattcagcagagagtagctaacatgaatgcctgtatttctaccctgctgtttcttccagaaagaattccaaggaagctgacaagaacatatactttacagcaagttttaaaaaatataaaatgagcgctgtggctcatgcctgtaatcccagcactttgggaggctgaggtgggcggattacctgaggtcaggagtttgagaccagcctggccaacatggtgaaaccccgtctctaataaaaatacaaaaatcagccgggcttgatggtacatacctgtaatcccagctcctcgggaggctgaggcaggagaattgcttgagcccgggagacggaggttgcagtgaactgagatcttgccactgtactccagcctggccaacagagcgagactctgtctcaagaaaaaaaaaaaaaaaaaaa

SEQ ID NO: 58148 - DNA, 4146 bp, Homo Sapiens
cttcaatcgaaacattttgttggctgagaatgtgcattttccccctctcaggggtaaggatttgcctcatctcattgtctagcttcctgttgagaagtgtggtttgtgtattcacttaaactctgatgtcatattgaagcccattggtgggcagtttcagccaatcagatgcttcctgggtatccaagtaagaaagatatatagttctggaataacaggaaacttcacatttttcacatcctgttattctgggttttgtgacttgctgccttgccactatgaaggttagtagaaatttatgtatgtatttctttttgtagtatacaaaattgacaaaataaaaaatgacttgaattttcagagcactaagattagatctgtagagctgaaagacattcagatctcctatttaaaaatgttatgatgaagagaaattttatgttttgcatataaggaagctgaggcctatttaattccttttaaaaaatgcagcttaacccgtatttgttataggtggttatgtcagcctagatgctgctctcatttgagttgggatttcttcttaaataataaatattacaacaaatgtattctgtatgaaagatgattctaaagactatctgttctaaggactgttttttaaaggaaggatttagcttcatgaaatcagttatattttgtgccttttgttagaaatggcatcggtaagcacatagaatgcttagatgtgttcacagctttccttttacgttttgtggttccatctgatatttccttgtgaactttaagaaagtgacctctggttttcagctcctttcttgactcttttagtgatttggtgggtttttctcttgaggtagtttttcaaagtctggttcttctttatttatgtttaaacatctcatgactatttttacttatttggaaaattatagacagaaggcctttagctgcagatgaattttgaataatacagcaggactttttcacatttggtgtcacttttcttagcttctcttggcgtgagcttcattacagcagcatgcggtgcctgcagggtgggtggctggttggatgctggtgcacgtctccattcggatgccttttcactgtgcaccggcccctgtgctgggtgttgggagatgtacaatctgccactgcagatttttagtctagggaggcctgtagacatccaccatcaaactatcatgacacgtgttctgggggagcctggctggggacctgaccgggtgtggtgggggcagccaggctgtcaaggcagggctgtgtcaggaagcaagatgaataaggattagccaggaaagggaagggaccgaaggcaggaagaggaagaagtggggcttctggcagggtctgctagaggtgtggggagagggcaggactgacaggaggagacgagagccctggagagaaggtggggcccttgtccactgatgcttattcccggtaatctcagttagaacatatggcaacaggatacacgttttggtttttaaatgtatctttctgttattggcacctctgaaagaatttttttcttaatttttctggaacgtagttgtggacgatttgactgtttatctttgcttgaggttatttggtgatcagaagccatatgtagtctttgggcagtatctgagatgagagctctgtttgttttgacatggctgtgtgtgtgcacacgcgttctagacactagttgccacatacctaggcaaaccaatgtgctttacctttccaagctccaggatggtggtgggaagtgcctgccagtggcaatgtgaccagctccatcgtggtcccagggctctagatagccctggactggaggggatgcggttgtgggcttgcctggttctggcctcagagctctgagggtggtggtctcttgtccctgcccctttcctatctgggatctgcttctcctgtctgtcctccttttaccctcacatccactctgctctctgatgtccgcattttcttttgctgctgttagctttggaatcgactgtcattttcccttattttctgtggctaggaaagaacatctgtagcacgccttgcctggggcctctgtgttaatctaaggagaggaggattgcgcaagcaccgtgcttgcttgctgaatgccagcagcccacccccccaccccgccccgcccccgtgaatgagctcacactccagaggggcaggggcgggtgttgggtagggaattggcctaatgccgaggggggaccctgcacctaagtaggagaattttgattgggttcttacctcaggactgagagactgagcgtgctggtctccctgtcgcaggttgtgcggtctccttaggatttcaggctgagcatcgtcgcgttgctgggagaacttagttcatcctgcacccaacataagactctactaattttgcttgtttaatttttcctttcagacgtttgatgcaaatgatttgtatcaggggcagaattttaacaaggtcctcagttccttagtgactctaaataaagtaacagcaggtaagactcttttttattgaactcgagggggtgggaagacatacgggctgacacctttggttttcttgttttaccaaagccaggggagcattactgaatttaaaaaataagcttttgttgcattacgttttgattgttccttttgctgtgatattttatttgccttgttagaatagaatcttctttaaatgttctggtatatatcaggtgttttcctttctgtgggtggagagatttctcacctgaacgtatagcaggagaaaagtgtctagttcttatgggaaggctcatgggctgtgttggagctagaagcacctttctctcagtttttactgagtgtatgctggttaaaatttgtatctagtgggcagaagttttgagccgtgaccatgataagggagtggctcgtggattggcctgtaaagtccacactacctgtccagggctcctgagggctgtggcacccaggtacatggtgtgtgtggtcctagcccccattagtactgaagtggagaggaggttttggggacatggtgtgcccctctcatgggccacagcgaagacaggagttgttcagacaggtcctctgagggaaggtgcatgttgtccatgatgccaaggtccccggaggaaatgctccatgagccctgaggagctctttcttggatttctgtgtggctcaaaaggaaggaactttttagttgctttttttgtcttattagagtaatttttttttcctatttaccttcacggatgttaaatatcaggtttgtgggggaaagtgccgtgtccttttcaaacagaaacctcctgagttgattttgtcggggtcgcttctcagcttcgtctggcccttcagagaggggggtgtacttgcctcactgcacattgaggagagacgggggttatgcatgctttggggctgcagttcctggctcccggaggcttcatcggtggtgcagggactgtccttggtgctgcctcccagcgcatgtgtgctctgactgctgtctggaagctgatgctgctgctgctgatgctgatgccctggcgagaggcactggcccccatccctgggagcaggggcagaccccaggcagaggtgtggctgtggctgcgtgttcacagcttgacttctgaggtttaaaggactgttcagatgaaagcatcgaggaaacaaaaatttaaatagcaggattatgaagatggatgtaactaatgaaaattgtcacattatttaatgccttctctgtctctacaatctaaaaatgatccttttaatatgaacaaacaataagaaaatcacagccgggtgtggtggctcatgcctgtggtcccagcactttgggaggccgaggcgggcggatcacgaggtcaggagatcgagaccatcctggctaacacggtgaaaccccgtctcaactaaaaatgcaaaaaaattagccaggcgtggtggtgggcacctgtggtcccggctgctcgggaggctgaggcgggaggatggcgtgagcccgggaggcggagcttgcggtgagccgagatcgcgccactgcactccagcctgggcgacagagcgagactccatccaaaaaaaaaaaaaaaaaaa

SEQ ID NO: 58149 - DNA, 4054 bp, Homo Sapiens
gataattgtcacacttacaagggcatcccagaaactctgctataaatagtctattattttctccatattggcacataatagaattaactttttatgatattgccaaagtgactttaaagaataagtgtacctcatacaggacctggtgccaagaagtagctgccttttcttagcctaaatacacacacacacacacacacacacacacacacacacacacacacatcatacacacacacatacatagtgattttaacagacaactcaatagcacacattctttccttttctaagctgtagtagttttgactttttgggaaagatacctgcttactgaggccaaagcaatttttcttcagtgactgtaatttgcctgtgtgactcgggtacagctctgaacataatttttacaaagtctgtgcccacaaaatagactaaaatcatttaaaaatgcaaaagaccaaaaatggaacaggtgacctggtgccttttagggtgtcggaaatgttctctctcttgcacagagataggaagcccgtttgggaccattttttgctttggtcctagtcttcctttgctatctgcttagccagcagctgacatggtgagacaggtttgccactgtaaatatgatgcaaacttctggggcagctcttggcaaacagaagcatcagctgtgtcaaaacaatactttggctgagttgtgcccataagctgtggagccgttagggctgtttcatgtaaatagaggaaaaatggtcctgtaaatacattaattgcactgaagctgaatttagtattgtattaagtcatatccagaatgtttttttacccagtatggttctcagaagtcttaaccatccctgaaaccagctaaagagcagattaagtgaagtgacatggttaatacctgttgacatttctaagagtcaagggtttcaatggctggggtcgtgtctgcaggtgtaacactaactatataatcactatactttgtattaggcagaaatctagaagaatttggagcattatctccactggtactatttagctggactgttaagtattttcttccagaacttaagaaacgccactctgggtcagagagctctggtctgttgtatctctagtcagttcagtaggagcattttccctacaataatggcaccttccccagatgaacatttttgaagatcagaaataaccttagaatctcaggaacatcttctgacattcccaacttccctcatctcctattatatattatttttcgtgaaattccctcttaagctcattgtgttttcacccagttcactagaccaacagcaataccagtaccagagttatgttttagaaagtctactagctgtccacaaagtcgtagttcattaactttgacccaaaaaaaaaaaaaatctcttaacccttaggaagaaacacacaaggctatttattgcatattcttgtggtttggtgaaaaaaagaaacctgcatttcccttcccagactcaattccattgatcatctcagttccattgattattctatatttacctctccaggaagaattatttgggaaaacagggggaaaaacataagtcttagagaattataaattaatttccatggtattctcttccttaaacactttctaaatacgctaaatttttttttacacaggatcactaccctcccccacagatattttaagagcataaatgtttaaattttaaaacatgaactgctaattattgtaactgaaaacataaggtttatttcatgtagttgttctccttgggcctgcacacagttctctgaaacagaggaagaaagagagagagagaaagaaattataatgctctagtatgcacagaagcaagtgcacgcatttttaaaatcattttgctgcctatatgatttcaatggtttctttataaagtgatcattattcaaatatgcgaagcctctacagtctaagagcaaggccacttctgcaaggcttttaattgtgatcttaaaaaattaaatcaaaagcattttctttaaaatatctttgtaatatattacttttcctaaatatatgagtgagagggcagtctttcagattcttactgtagagttttgattttaattgtgtgtttatttctgtggatgctttggtataatatcttagtaattccaaatgtaagcatacctcagtaattgtgttaatagccataaagccacttccatggtgcttcatcattgtaactgacggtgaaactaacaacaataaaaagtatgttggaggtgctaacatgttgctttcaacagaaagcaacttagatttattagggaccaagggtagcaattaatccttctgcctggttgctttctctctcccagtactcccatgcattagatgatgtcaagaagcaactgctgctgtgtgaattagccttctccaaggtcaaaatggagattgcctacttcaacacttgttactaaagagcagtatttaggaaagaaaccccaaatcactattaatatagcttccagcatccctaaaatgaagcttctgtgaacctagggtttaagtccccatcttagatcagccattggttctggctcaagtcattgcggatttaagaatcatgatggtgagaaatatcctccagaaattcaaccttttctatcctttttaaaatgggcctttggactctttttttggtagtgtttgtttttgaaataaggttcctttttttttttgagacagagtgttgctctgttgcccaggctggagtgcagtggtgcgatctcggctcactgcaacctcctcctcccgggttcaagtgattctcatgcctcagcctcccaagtagccgggattataggtgcccaccaccacacctggctaatttttgtatttttagtagagacggggtttcgccatgttggccaggctggtttcaaactcatgacttcaggtgatccgctgccttggcctcacaaagttctgagattacagacatgagccaccatgcccagcctgaaataaggttcttaaactcacatgcctttcagttgactcctgcagtcagtcccaggaggacattaagtagtctatgcatatgtcctatgacttgaggagtaaattggaaagagacctctatactatcgaaccacagcagaaagtaggctaaaaatccagagcgttctagagaaagctaattcatctagataatcacagattaaaagtctgctaggtgataccatgtatccaagatgggtcttcggtgttcctttgtgcattgccctgtcaacctgcttgctgatcaccttggaaactgtgcttctccttaggagaaattgcttgttcgggtttttcatgacaaacctaaaaatgttctctgagccttgctttaggtgcattggaataatgcttgtcgacccaagtaatgagaatttatgagctcatgaaggaattgtgcttttgtttctgcctggctaacttatgaatttttgtctacctcattttcgtattaaagtttgcagcttctgtaggtaggaagagaaaatgtttgataccagtattttataacctcactgcttctctccctagaagaaataaagattgtaaatatcactaccatattttctaaacacagttttaagcagccacacctagaattttctgaatattttgagcagtacagatttctatgtgttatataataaagcatatttattttttcatgttatttaattttatatacaatgtttaaaaaatcagtgtttatcagcagactgtaaaggcaagtaggctctgtggattagaaatgaatgtatatgtttcttttggttttaaaaagatacattttaattttgtaaattccctccaacctgtacaacccctccctcaaatctgagtagccaagtatctagctttgtgtaattagacagcttcaagtatgtattttaaagggatactttaaaaacatatttctgagttggaaatgatgcttagatttataaacaaaaatatatgaggcttaaaaaaaaaaaaaaaaaaaaa

SEQ ID NO: 58150 - DNA, 3821 bp, Homo Sapiens
ctattaaaatgacttatcaaatatatatttttctatttttaactctgaaatttgtttgatatttattgatatgatggagtgatgcttgggatgcctgcgacccagccagcaatggaaaatagtttaggattggccctagttcttagattagactctggtctcttttgaaaaggttgtgaaatcagtggaaatagggtatataaatatatttttatatcatctttattctgtgatgatatatcattagcattaatccctgtatgatagtttaatagaagcactttgtaaataatggttttataaaattaatgtagtaatgagaatattacattttaccattttacaaattacctacatgaagattaaagaagtaacttgcgaaagaaattcagctagctagtgtagaacagagatccgactccagttcagaatctacatctgactcctagtctagtgccttttttatatttttatttttaagtactttaaatataaatgtacgtgtctaagagaataaacaaaccatagtgatgtttcacatggatttttcttttgatatagcttataatgttacagtgttactgttaacagtattaaccattaattaactggtatgtgcctttgaaacttttgtatgtattattttatttaagcctacgaagaactcttgagagtattactgtccattttacagatgaaaaaactgaggctcagaaaggcagtcatatagctcaatatgctagaactggagtttaaacctagttctgtgttctttcaaagcacgttactaaactgtttagcctgcttatttttttaaacgaaaatttatgtgatcacaaattcaacccatctcatgttaactaacactgattatggaatcatttcctctcctaattcacctatccaaaaatctcagcattttagagagaggtgaggtagtgttgagaaaccatatattcctccgtaatgattttaactaagggaatcatactatttttataatgtaattcaaagatatgaatcttatccccctttaaaaatgtttatgaaatatttgtatatcgtaaactatgttgaagttcaagtaaactaatttgggcaagtccaaagggatattttctgtgactgaacatttatctcatgttttcactttttatagttgataagcaataatttattttcataagacattttaaaaacgcttttcaaaattagctgacacccttaatgaaaaaaaatgatgttatagaaagagtattattcagaaattaatataacatttcacatctgactggcctgggggtaaataaggcttattatcatgaatgaaactgtaatgatgaaaagtgtagagaaaatctcttcttagtaaaatagccagaatgtctgagtttgccaaaaccaggagaatctttgctttaaaacctgtctcattccctgaagttcacctttcctcaggaatctcattaaattactaccaccacctggctggccaaaagagggtggggacacagagaatgtaggcaattttttttttttttttaaacaggatctctctctgttgcccaggctggagtgcagtggcgagatctccactcactgcagcctccacctcccagactcacgtgatcatcccacctcggcctccttagtagctggtattacaggcatacaccaccacacccagctaatttttgtttttttgtttgtttgttttgtagagatgggtttttgccacgttgcccaggctggtcttgaactcctgagctcaggcaatctgcccgccttggcctcccaaattgcggggattacaggcatgagccactgcacccagctgaatgtgatatttaaaatacctcttttaatagctcatatcatgtaaccgtttattcctggtacggtgtggagatcttatagcgaataatttttagttacatgaattttagcctatgctattctaaatgagaaggtacatttgattgcctaatgcctttctattttgggcagtcatatttaggactttatacaaggtgagaagcattaacagatagtactttgattttactttttagtaaaactctttcacctaaagcttataaagataatgtgaaatttattgagataatctgtcattatggaaagattacaaagttgattaccctaagtacacttctaccactcatcctctgagtagaagggcaggagggtggggcagggctggaacaactaacatttcctggaattcctactctgctgggcatatggtagacatgttcacatgtattcttttatttttagtatacatagaaatgtagaagtataggaagtagggcaaagagaagaaaagcgttgtgcatggaattattccttcctttttgtttgtttgaacggtcaacttgttaaccctccacattctttcttcatctgcttttggcagcagcaaatacagttgattgtttccagtctctgaatcataactacctgggactgctgtatagtgttcacctggccagaggtgcttcttttttaagttttcagaagacaacatttgtacttcttaaaaaatgttatttgaggattaaaacatgaagacaaaagaagaaaaagaaaaccactagtactttagacatgttcagatagtcctaacactattaagactctattcctgtgtacaataaagatgattttctggcctgtggattaaaaagcatggaaatactcaagagcatcgcttaaaattttttcttgtactaggagaaaatgtttgacagttgtatttattaaatatttatcaagatataatacctttatttttataattcctgattactttcaaaataacatattaattttaaggataaccttgggagacagcataattctcatttttcaaatgagaaaattaaggttcagatgttagattagttttttagtaatgccgtaacacggtactacaaacaacagaaatttattgtctctcagttctggaggctagaagtccagaataaggtattagtaggtttggttctttctgagggctgtgaagcagaatctgttccatccctctcttcttgtcttcatctgttctatgtctgtctttgttcaaatttcccctttatataaggatagcaatcatattggattaggcccagtcctaatgaccagatcttaacatttgcaaaggccctatttctcactaaggtcgtatttacaggtataaagggtgtagactttaacatctttttggggaagacacagttcaatccgtaacagatgttaagtcctttcctctcctaaatagtgtctcgtaagtaggaaagtttgacatagcacattgtagtgccactaaaatggtagttttaaaagaacatgacaatatatttataataccacatttaaaattcattttctaatactggcttatgtctggggagattttattttaaattaactaagtttctaaaatattaatagaattttgggttgtaatggtttcaaactttttcttcaaataataagtaagtgatgacaccaactgtgtaaagttattcaaaacccagtgcttagatctggctttatgtctgaacttccattaataaaatgtagacttgtaaaatgtggactcctctataagatcttgaaatgtccatcagaatactgtttaaattgttgcaagagcaatctgacagtggaatatctgtacatttcatatttatgtaaaaattgtggttttaccagtgttaatacacatcttgtgactagggatttctgagtgttggagaggtcaaagccatactaggataaccaaaaaaaaaaaaaaa

SEQ ID NO: 58151 - DNA, 3799 bp, Homo Sapiens
acatttattgagcacatagcatgggcagggcttgtgctgaattctagggaaatgtggatgtgggctggagccccttgtccattttgttggtgctcatctggccccgctctggtgtcttttctgcaccatggagaggaagctttaggggctgtagagagtgtggctggattgcgtcctttctcccctcatcaatctagcttgggatccactgtagatcacggtgtctgcagctcactgagagtcccaagtaggttgcagacccaactggttgccccatccacctcacctatggctgattttcataggcagttgcaggattccacaatgacacagtgatatttcagcccacctgtccacctgctgagatcactccagagcctctatctagcatcttccccattccgcccagcttgatttcagctatacattttgatcaacctcctccctctattccttctgctaaggcagactgtccttttgccccaccatgccacctgggaaaattctgattcagtaggtccaggatagacactgcgatgctctattttaacaggcctactagattgttgtgactgcagtcaagtttagttatcattgataaaagccagtgacatgctgttgagcaggccaaggacagagcccaatgacatgtcactagaaatttcctttggggttgacactcattcacttatgtgtgcccttgggtgtcatcagtcaaggagtttctcatccatctacttgtcattacatcagactatatttctgcatcttgtctttgtagatagatggtatctttcactttttcactggttaactggcctaggcacttaactgaacctagcactttcttattgaacccatgctgggtcctgaagcacatcattttctcatccaggtacttgggaacctttatcagcaaagcaaggactaaggcataatacatcactcctcaatccgagaaacgttttcctcacttggcttccaggatatcacactctcctggtttccatacctcacaggtggtgccttctcacatgtgtttgctagttccacctcatttccctgacctctaaattttggagtgcccaaggctcagtctgagctttgactcgtcttaagaaatctcatctagacttggggctttacatgccatctgtcactgatgacttccaaatgaatatttttgcttccaacctcatctgaattctagacttgcatagccagcatccacactgaaatgcctggtaggcttctgaaacttaacacattcaaaacaacacaagtgattctcatgccctcccaacctgctcttcccaattgcggtaaagaaacaactccactcttctacttgctcattcctgacactctgctttcttttctcctcataccatattcagcccatcagcaaatactgtcagctctactttgaaactatattgaaaatccgatttcttccaccacctccgctgttataccctgttctaagtggccaccacatcttgcctgcatttgtgcagaagcctccaattatctccctgcctctgctcttgcaccctgaccctcaccctagggctgtctctgtgcagcagctggagtgatcctttggaaatgtaagacagatccttttacttctctgcttctagccctccagtgagcttatcttctcactcaaagccatatatggtgcccatggcctgtgtgacatttgctttcatactgtgtgcttcctcactgtgtcctatggtcctacttatcaacttgctattcctcccgcatcccaaacatacccccacaaccccagggcctttgcacttgcccctgactggcatgctcttccccagaaaaccacatgagtgctatcttctacttcctggtttcttctcaaatgtcacctttgacctagccctttcttccccttccttgtgtttttccttctcatgcgactcatcacttagacgctaacaagtttattgcctggactttttatttattaccacactctagtacctagaatgttagatggcacatagcaagtattcaagaggtattgcttatgaaagaatgaatgagcaaatgagcaatgacagcattctttaaaacactggctatgtcatggagttatagaagtcagtacttgcctcacatctccagtaagcatactatattagcgattcttacagaataaaaggaggtaaatacgtgtggtttctgaagtctgatttgagaataatacggggttagaaacaaaatatatatattgtctatatcagaaaagaagaaaattacttctctcgtaaaagtggaaatctatatatgattatctcatttcatggaaaaattagggatgccattccttttccgttttgctcaactcttatgcttattacttagttcttaagtgggagcaagagggagagtgatcactcacaattagaaataaaggtattggggcgagggaggactcagcttttcagaggagggaaaatgcctttccctggtccttagtgtgaattgaatgttcccattctgcccctgcctccctaatacagcacctagcccactaagcagagtggatacctactcctggcttgtctggcctggaaactccttgaggacaggagcctgtctttgccctttattctcagttcctaccacaatgcctcctacacaatggatgcccagaagctgtttgtgactaagccaatgagaacatgcaaaaagagctttacacgttgtaaaatgctacacaggaaaaaaataccactttttataaaggagttgcatttgcacttccctgacttctggatcccctcaagttaactttaagagaatgacattctatttcataggtggggaaaccaaggcacagagatgtcaaactggaagtctggccctctccctcccagtcctctggccagtcccctgtcatcctccattgcactcactacgctgggttctctaggggtgattggaaggaaagaactggtgcccagtgctgatcccagtagggagaagggggaattagaggagctctagcccccatattgcttttctccttggctttgctgtagatgatgtttctttttcctggagggtttttcccagcccactgtctgtgattttaggtctcaatgcagaacactccagttcttcctgtcacaattatacaggagactcaccttggaaaacctttccctatttgccgaggaaggaaaattcagtgagattcattgattcaggaatgtcatagcagtacaggccagtttctgttgcctgagggaggcaatagaggaaaatggttactcagatgacttgagcagaaaaaaatagatttcttaacattgaaacttctttaaggagacattactgagatgctgaaaatacttctatgaagacttggttttattgactgaaagtagattgtgattcttttcctcaattatcccaatgattccctcaagttctctgttgtatctaaagagctggaaaccggccgggcgcggtggctcacacctgtaatcccagcactttgggaggccaaggcgagcagatcacgaggtcaggagatcgaaaccatgctggctaacacggtgaaaccccatctctactaaaaatacaaaaaatcagccaggcatggtggcaggcgcctgtagtcccagctacttgggaggctgaggcaggagaatggtatgaacccaggaggcggagcttgcagtgagcccagatcacgccactgcactccagcctgggcagcagagtgagactccatcgcaaaaaaaaaaaaaaaaaaaaaaaaaaa

SEQ ID NO: 58152 - DNA, 3350 bp, Homo Sapiens
ggattcgccacaaaacagaagcctcaatatcttttcccaagaatgcttctagtcctcctaagagaaagaaactatacagtcaatgtttgacaaagtacatgtagctcattgtagcatcaacacatatttgagaatgcatcatataattcatgatgtatcaatgctttacagccaagaggaagttcttattattttttcaggtgcccattaaagaactagtcatttattcattcattaagagaggtcatggggtgaatgtttcagtgaatgaggccttgttacctccacccccacaggctggtcctactcctaactcagcagtttaggtccagaattcctgtaggtggtatggctccattcagagtccagaatgtgctaagagcacagtcagtagttccttcaatcatctactttaaagtgcatatgaatcacctggggacttggttaaagtgaaaattttgattcaggaagtctagagtggggcctgagattctcaattttgaataagctaaggggtgatgctgctggtccacaatgcacactttgcctagcaggcctgtagagttgtgcttctcaaactgtaatatgcattagaatcgcctgcagggcatgttaaaacacagattcttcaggtctgagaatgtgcatttctaacaagctctcaaaggatacagatgttactggtctgaggcagccaggtgctaagaatcaaatcctttcatgcgtcctaagattaagttaaattaagatcaaattgaacttaaaccaaaaatagaaaaacaccttaagctttttgatgcttcccaggagtcccctgaattggagagaaggaagcctaaaaaagacaaatctgcctctaattctgacataactctttccagaacttcctgtttcctaacttattctaatgttactgctgtgaggtactgactgtactacaaacatctgatctactttatttcactccagctaatgactagaacttaatattatttaaaaaccagaaagcagaaagtagacaggtggtgagaaaggaaaatgggttaagaaaaccaagactgtatctgtatgagattcagccaatagacggaaaacatcttttagtttgttctgtgttaaaggacaaaggatactttttcattgatttgatttatttttaagttgaatgatacaactcatagagttattctgccatcattggtaaaagttagatgataatcaaatgcaaattgaaattcaatttagaattattgactgtccttttaaatagtaacaaccttttcacagcaagttttatgaaagccaataaattggttcaatgatttcactgttcatttgttatatagtagtctttggtgcttggatgtaaaacgtaatagaaagatagaaaagggagagctaggaaatggactataaaaaccaatttctacatttaaattaagcttacaaataagaacttgacagctagcagaattggtttccattagacattactcccaggagctatattacatagtaaatgaatatttttcattatacatcctacatgacccattcataaatggctatttacaaagctgttttactactaacttaaaaaaataggaactttgaattaccctctgtgctacttttattttaaacataaaaaaaaaaacatttattgtccctcattcctctgccattgaattccttatggtttgctttgttttagaatgcaatgcgggcaacagttgaacaccaggaaaatcagccttcccttacaccaatagaggttattgttgtcttgggaaaagaagaccttaccattaaggtaaccattctctgttttccttttgggtgtctcttgagagaattaaatagggtcaatagtaataaagctgtctgctttttgcaatagataacagtcatatatgccaggtgatttttaaatgaaggaaagccatttttatttagacaaatgcacattgtttttaatgtgtggctttgatgacttgtttgtttgttttagatttcagacagaggaggtggtgttcccctgagaattattgaccgcctctttagttatacatactccactgcaccaacgcctgtgatggataattcccggaatgctcctttggtaagaacaattatatggctaaattaatctcagccacctagttctaaatgtagagcaaggattgcaagggattatttagacaagttcatcaattaagtaaaattagacatgaaggatataagaatgaatgataaagcaagctaaaaatggtgaaacaagggatgtctgattggaagtagaagatatttatttaggttctaggacattagtatcagtgaggacagtaatttcctgcttgtttgtatttcagtgatcacatacacttctttacctgataacgtctctcttctctaggctggttttggttacggcttgccaatttctcgtctgtatgccaagtactttcaaggagatctgaatctctactctttatcaggatatggaacagatgctatcatctacttaaaggtatcccttgaattcaatagcaaaatcctgtttctaaaaccattgctccttttatagccctgagtgctatggtccggagtgaattccccaaactgagttaatgcaaataatgactacaggtcattcattctcttctctttctgggtgtgtgtacattatttaatatgataacttaccaaagaggaagctgggccatactacctgcctcaagtgaagcaaaattgtttcctaagaaggttaatacattaccaaagtttcagaatgaggacatgttcatgtgaattttttaaggcaactccttttggcatctatgagagtagctgtgcttttattttacttagatttgtgggaaatatatgctaataatgttccagcctgaaaaaaataacaggtatcaagatactcaagtccttaagctgaccttgttagaaatcctgggaaaggaaagctgactgttccaaagctgtcagtggggtgccagacattcactgtttgaacttaaaaacttggtgcatgttggctgggcacagtggctcacgcttgtaatcccagcactttgggaggccgaggcaggtggatcacaagttcagtggttctagaccagcctggccaacacagtgaaaccccgtctctactaaaaatacaaaaattagctgggtgtggtggcgggtgcctgtaaccccagctactcgggaggctgaggcaagagaatcgcttgaacccgggaggcagaggttgcagtgagccgagatcgtgcccctgcactccagcttgggcaacagagctagactccgtcacaaaaaaaaaaaaaaaaaaaaaa

SEQ ID NO: 58153 - DNA, 3180 bp, Homo Sapiens
tgaatattctagctaagactacacttatattttcaggctttgggactgcattaaggagacccttctctattatgtttgttatgttcaataattaaatttttaaagaagaaaactatgaattaagagcccacctaatggagctcagataagtgtaacagcaaaggctctgatctgcacagatatgtacatctcaggcacagcagaggctctgtgcaaacctacattttgctcaaatttcttgtttccttcttctcaatctgccaaaaatatttctagtaaaaagtaatttttgctactgtggctgtcttgtaactaacttttatttgctgatattcgctttttagcaaatgtcacatacaggaatgacttcattaggatagtatagttagtttaccaaattattgctttggaaaacaagaataccaaggataagatatttatatttggtccactaattagttattattagattactggtggattactttatttgttacacctatttattttaaggaggtttctgagaatctgttaagagtgtgtccattgttgctagttttaggcagctaatgattagctttatatataaatgtacaaatgacaatgaaaagaattttcaatccactataaattagttattagacaatcaataaaaaggtcattgtttttcaaattaatgatacaattaaaattaatttaatgaatagcagataaatgtccaactaaaaaatatatgtcacatcacatataatgacccaaatcaccacttgatccaaagtcaaggaccttgaaccaaatgcatttaaaatgtattggtttattcggacatagatttcctttataagagaaaagcattcgaattcacccatttaaaaaaaatcatctttcattctttctaaattggacattaaatttgccaatgactgcattgtgttaaaggtgtggtccttttgctttctgatccaaattggcttggaattgatccaggatttcaagctgggattcttctgcacatttaaatgtatgtgacttgattggaagttgtcaaagacaactcattaaactggaaatctcactatgtcattgtttaattggtctttttttgttgttgttataagtatattgaagtgttgtaaactacaagcacagcaacacactgaatagccagttactttttaaaaaagttttagagagtagtgattgatactgagagagagacacacagagagagagatacagagagagagagagagagagagaggcagagagaggcagagagagagagtgcttaactgaagtatctataataatgtactgtacaggttgaatacaatacctggaatacattacatttttctagcaggaagtaaaagtgaaataagccaggcacagaaagacaaatactgcatgatatcacttacatgtggaatctaaaaaagttgaactcatagatgcagagagtagaatggtggttaccagggactggagagctgttggtctaaggttacaaaatttcagttagataggaagaaaatgttgtacaacgtggtgattatattttctatgatttgaaaaatagaaataaatatactttgatttgactataagtagatctttaagaatcctgaagtggattttgaagatagcctatatttttgacaaaaaaaatatggatatacttttaaagcatgattttcatgaagcaaatactgcaataggccacatagtacattggttgatgttgattggtaacattgaataattgagaaatgtttttgtttccttagcgtatatgaatggagtggtaaacatgaagtattaaaaagtcacagtgttaaatgatctttgaatttgtatggtatcaagtgtttgtaaataattagattgcctttccagttacaacaggaaaaaaataaccttatttttcttcaagggcaaacaaaatatatcttaagaaagaaagtgtactacttgaaagggagatattttatggaaacatacagaagcatttgcagtaaatatttatcaattccatttaagggatactggtcatttcttcagtaaaggcaatgaaaataaatctctagaatatgttaactaagaaatagtgtattacattcacttatcaggcagatggagtattttgttaaaatcttaaactgtatcctgatattttattagtagcaacagtaaatgggctgttttattcatagtcttatattttaaagacatattgtttatgtatgaacaaagtaaatcacttaaggtgtaacaaatctttgaacccatcatagttctgctaaaatatactgatgcattcaacagtattactttctattttatgtttcaaatttaggatttttatttaatttgattattcaaaatgatattatcttcttgagttaggcacttacacttaaatagtgccttttgattttaaaagaataacctggaacacttttatttttcataatacctgtcacacattttatatgaggatgaatgttcttgtgtgtgcaacaagtgtaaaatttttatcagtagtttagagaactctgtggtggatattttttatatgtattagcattagctcatttgtactctatgctttaaataattgtcgtacatttggtagaaaagcctttacatacatgtatatgtgttgtgtaggaatacattcacacacacacacgcaaacataacatatacacctgtaggatgtagggccacaggacaaataacttaggaaaatacaattggctttaattttacctttttgtagcacataaaaacatgaaacaatacatcaataaacaggtcctattttactgaaatacaacagaaaaaaagaattaattttagagttaaagaagtagtttatacttaaatattttagatataattatgcaaggctatatggttattaggacagtgattaaaaacagcttaatttttctaaaccttttttatgataatgtactttaaattctctgtttaaaaatatatgtataagaattattttatttgtataaaatagatattaaacgattgggtattagaatctgtacattattaaatgacactacatgtgcaaaaaaaaaaaaaaaaaaaaaaaaaaaaaaaaaaaaaaaaaaaaaaaaaaaaaaaaaaaaaaaaaaaaaaaaaaaaaaaaaaaaaaaa

SEQ ID NO: 58154 - DNA, 2864 bp, Homo Sapiens
caatgcgaaactggctggtgctgctgtgcccgtgtgtgctcggggccgcgctgcacctctggctgcggctgcgctccccgccgcccgcctgcgcctccggggccggccctgcagatcagttggccttatttcctcagtggaaatctactcactatgatgtggtagttggcgtgttgtcagctcgcaataaccatgaacttcgaaacgtgataagaagcacctggatgagacatttgctacagcatcccacattaagtcaacgttttgaatcaggaaattgaagcgttcagtctgtccgaagacacttcatcggggctgcctgaggatcgagttgtcagcgtgagtttccgagttctctaccccatcgttattaccagtcttggagtgttctacgatgccaatgatgtgggtttccagaggaacatcactgtcaaactttatcaggcagaacaagaggaggccctcttcattgctcgcttcagtcctccaagctgtggtgtgcaggtgaacaagctgtggtacaagcccgtggaacaattcatcttaccagagagctttgaaggtacaatcgtgtgggagagccaagacctccacggccttgtgtcaagaaatctccacaaagtgacagtgaatgatggagggggagttctcagagtcattacagctggggagggtgcattgcctcatgaattcttggaaggtgtggagggagttgcaggtggttttatatatactattcagggtaagtttgctagttgaaacttgaaaagtacactgaatgtcttatacttaatctttatacttgagagaaaaggattttttcttttttgtcttttaaaaaactttattcagataaaattcacccttttaaagtggttcagtggttttagtgtattcttagagttctacaaccggctccacctcccaaaaggaaaccccacacccattagcagttactcctcattcttacctccccaaccccccaccccctaacaactactgatgcactttctttctctatggatttgcctgttttgaacatttcacataaatggaaatgcacagtacgtactctgtgtgtcagtttctttgctgtaacatgtgttccaggtctgtccattttgtatgtatcagtacttcttttttatgatcatataatattctattgcatcgatatgccctattttattcattcattaatggatggacatttagattgcttctactttttgaatatgaataattctgtagtaaacatgtaggtacaagtttttgtgtggtcatatatttccatttctcttaaatgtctaggagtagaagacctgggtcatataattgtgtgtttaatcacttgaggcactgccaggttgttttctaaagcagcagcccactttacatttccatagtcagtatatgaggattctagtttctccatattcttgtcaacacttaataaattgtctgtcttttaaaatataccaatcctagtgggtgtaaattgttatttcattgtgatttttattcgtatttccataataactaatgatgttgagcattttcttcatgtgcttattggccatttgtatatcttccttttttgtttcgttgtttttctttttttctgagacgaggcctcactctgttgcccaggctggagtgcagtggcatgatcacagctcactgtagccttgacctccccgggctcaagtgaacttcccatttcagcctcccgaatagctgggactgcaggtgcatgccaccatgcccagctaattattaaatgttttgtagagacagggttttgtcatattgctgaggctgcacactgttaacagggtgaattattatggtatatgagctagatgtgggaagtgagggagggaggagggggaggaagtgagggaggaaggggtggagagagagtcatttgtatatctttagagaaatatctattcagatcctttgcccatttataaaattattttgttattgttgaattgtaagagttctttatatatgctggatacaagtcccttatcagatacatgctttgcaaatggtgccctttaacacacaaaagttgtaaattttgatgaagtccaattttgtcacatgtttttgctgtcatatgtaaggaactattgtctaatgtgaggtcacaaagatttgtgcctttgttttacagttccaagagttttatagttttagcacttatacgtaggtcttggatccatgttcattttcatatatggcatgaaatagaggtttaacttcattcttttgcatgtggatatccagttgtcccagcacccatttgttgaaaatcagtgactgtagatgtaaggatttacttgaggactctcaattctattccattgatctatgtgtctgcgtctttaaccagtactacactgtcttgattatgtagctttttagtaagatttgaaattgggaggctgggcacggtggctcactcctgtaatcccagcactttgggagcccgaggcaggtggatcacgaggtcaggagttcgagaccagcctgaccaacatggtgaaaccctgtctctactaaaaatacaaaaaaattagccgggcatggtgtcgggcgtctgtagtcccagctactccagaggctgaggcagaagaatcgcttgaacctgggaggcagaggttgcattgagctgagattgccactgcatttcatcctgggtgacagcaagactccgtctcaaaaaaaaaaaaaaaaaaaaaagaaattaggaaatgtgaatcctccaaccttgttctttttcaagcttgattggctattctgggtctcttgcacttccatatgaattttatgatcagcttgttaatttgtgc

SEQ ID NO: 58155 - DNA, 2781 bp, Homo Sapiens
agcggtgaaaaatatggtaaaatatggaagcatcaatattgtttcattttatgtatatataatgaatatatatatatacatatatataaagtatttgaaaagtaggaaaattagaactttcatcgttcagaaattcttggcagtaacagcaaaattaaagcacacccacatacatctgtgggttgaatagtggcctccaaaagatgccttcaaatcctaatccccacatgtaaatgtgattttatttagaagtaggattgttgcagatgtaaaaagttacggatctcagtatgagatcatcctagatttagcgaaatctctaaatctggtgatgagtgtccctataggggaaaagtagtcagagagagataccgggagtaagtcatgaaaagacagaggagcgccaagaattgctggagccattagaagctggagagaggcatgggtatattttcccttagagtcttcaggataaacccaccatggttttgaactcctgctctcagaccagcgagagaataaatttctgtgatttcaagccaccaagtttatggtaatttatttggcagctctagaaaactaatgcacacaccttcagtctctgccttatattcaagccttgatgtataatcagtagttttgatttttttcctttgtttgatggaatatcagggaggtattgcaattaaatttttcactttaacaaacttcatccttatttttacttaagatttacattaagaaaaggaggaataaaaatactgaggatgcagtttcttcttgttgctcacaaaattaagataaaattataatcatcagccattataatattatttttaactgtatagggaaaaaatcatgggagtgatccattcaatgaaatagaataatatatggaaatttccctaaaattcatagcaaaaaaaaaaaaaaacctacccatacttatttttcaggatctctttacttctaactattagagttccttcatttttttctttctaatgacttgagattccacttataattatgaaatcaaatagaaaaaaataaagtgacttatatttaattttcatatataaataaaccttattttatcctatttaataggatattatatttaattttcatatataaatattatttcatcctgagatatacagagcaggcattcaacatgtactgtttactcattttcttcagacatatgtaataccataaccaattacatgtatatatgcatgtatacaccttaaatatttcaatttttcacaaaataataaaccatgtcaactcttttaaaatctatttctcaggtataccatctcacaatgcaaaatgcccctttttgcctaatttgtaactttttcattcaattatgccatcctcctttttgccagaagctaggttattttgttttgttttcaataattttctgttacttcataaaataggactagattcttaactatttaagtgagtatcctttgtcaaatttaattatatcagtattccttaaaatacacatatatatgaaattcataatgcatttcactgcttttcacgtaaaaagaaaacaggaagctcaaaatacatttcagcaaaatcatagaacatctcggcttggatgtgaataagaaaatttctctttttaaaaagtacagcattttttaatatgatgaatcaattaaatacaactgtcaattaaaggcctagagaattgtattttgagcaatacacataaacacgcacacaagtagcaaaatttgttttggccaaaataaaatccatttttggttgggaaacttttaattgagaaaaatgtattattgttcttctactcaacacagctttatggttatgccaaaaaactcaacaaaatggcaataatcaattcttcccagtctgaggaatcagccttgttaatctcagtgtccttgacagttcattagagattaaggtaaaccacatttgcactgattcctcacatttttggaagtagtacgttgatggataagataaatctgtgtaatttttcaacatttctgtgaagaatacaaaagatgatgacaattgctataaatcatcctgagcaacaaatgttatttgtcgagatgtagcctaatataatccagtggggctttcatagacactcagacctgggtcgtgatttgaatgaggacagtgcttgtgtatttgctatggtaactaatgtttcattcttataatttatctttcatcttaagaagttaagctaaagtgctaattcccaattactgtgattcagacaacaccattaatttttgtttctatagttaggctttatatgatagcaggtacttagatttacagtgccctgaccagagctgagtgaagaagcagtttaaatattcatagtcaggatggagcagatgagttgaaaagccaaggataagaggcaggcgattatcaggatacaatttctcatctttaacaaacactggagtctataaatagggcaatttatcagccatttcacaacttctactacaattgtatacctcttaagtattaaattatgttatgctcttagagctatttatattggcagcctgctgttcagtgttttagactgagtcatcatagatctcttaatttttctacctataaagcattttttaactcttttaggtataattggtgctggatatattgcaagaaaatcataagggttcttaaatacccagcatttaggcttttcagtaggatgtgtttaacattggaccaaaaaaaaaaaaaaaa

SEQ ID NO: 58156 - DNA, 452 bp, Homo Sapiens
tggtagagatggagttttactatgtcacccaggctggtctcaaactcctggcctcaaacaatctttctgccttggccttccaaagtgctttgattacaggcatgagccaccgcacccatttggccctaatgcaatattttgaccaaccaaaaatcagttcatcttgactgtgagggcccaaaagggcagggaagacgaggtgggaaaaaaaaaagcaggggttatgggacaagagctactacttggctgttacctcctctacagctccaaacaagcctattaggtgggtcctgttattaatcctgttttacaggaaaggaagcagaggcacagtgaagtcagataattcatctggagtcacacagctggggaccagcagaactgggatttaaacataaagtctgtccaacttggagctaaagcacttacctgagagaagatggaaggaaaaa

SEQ ID NO: 58157 - DNA, 2642 bp, Homo Sapiens
accagattccttctaaaagaaggaaggccatgtctgcctgaagcctattggccgggcctactctggacccgcccctcttttttttttcatgacacacaccacagcgaagtctgtgcggaatcctaaaccagcccaatttacatccattcatgaatctgtgacgtcagcaagcctttgggctcctttgcggtgggctggaggattgtgtgggtggaatccccctcccctttatttttccaattctgcaaggcttttaaaattcaccttacatcttttcaaagcaagaaaatggaacagcatgtgtaggaattcttcgttgttgtgagtattgcactctgtttttcctgtttcttcagtatttatttcacaaggacagacagagaatgtgtgatttgaggtgattagaaagctgatattattgagggcgacaccgtgagagagacagagagacagaggcggagagaaacccgaaaccccgttacagctaggagcctccgaaactgacagctggttttcctttgcttgtctgcctgctagacgtggacatttttcatttacggttctgcacgttacctcggatgcctgcttggctttccttaaagggagattcatttctctgagagatgatgtggatggtattagcagaaaagcccagaacaccagaaaggtgctgagaaaagcggggcccgcaagacagagcaggttctatcctgtggggcacttgtcttccttgcgaccgtcctttctgccgttcctcacccttcaccttgcctttgtttcatattgtgtaacagtcagtatcttgcgattgcaatttggtgaagatgaatacttgttcaaccatttttcaaaagctcttatgacgggagccatagtggtgtatttatatatattcatagctcttctttatgtcactctctacactttatagtgtcaaaaacttaaaaagctgcattcgagggaaagggggaattatccttaaacttgggtttttcaatatcctctaatgaaaactaagaagtggttacaatgttccacaattatattgcatagaaatgcacatgagtgttttcctaagatgaacttattagctgaaaatagtttattccactgtgttggggaaacatggaaaagttctgatatgttccatgtataaagttggtttggtagtttgctactgtagttttaacaaaaagttactatttgtgattgaatttgttttccaagggtctgtttattctggtgaaagttgtgagagtaaagaagagggatgtgacattgtgacatgttctgcccctggggcagctcctcaacccgaataatctgacagcatttcccaactgcttcactttgagcgatttatatgccagtctgcagcatgtacccagttgttctttctcctgagaaagcaaaatgcctgatatttcttataatccaggctgccacgtttaccttgtaaaatcaatacttaatttttagatttttatattatcttttctcgtgaagcaagacttctaaattatggctataatatcttttgaattgttgttcttaatgaatcttccaactgtaaactcatctaatttcaaacttatcatacctgaggatgtaacattgtcctttgtttctcatcttgatattaccgtcaatcattttgtatttctgagtacatttgaacttgctggagtaatagagggaaaacctctgcctgattctaaatcagatctttgtcctatactcggacaattatggtttcatattttattattttttattttctgggtttaacaaatgagataacattttagacataatatttgtaaacatcttgacttatttcagcattttccttttttgtgtatcttcagagagtttgttgaaagtagcaatttccaagtaattttaaattattgaagtctactagcacgaaaggtcaaattcttaggatatttaaaaaatgttgtttaataatcaaactcatcttaaaaaatgttcatcagactctgtctttgatgcacattttgccaaaagagagccttatttctgtgaaagaaatacagtatgtactttggatttactaaagtaaaactgttactttaaggcacagagcagatatagaatccccctctctccccactcctagtgactgtattctacattatatttatcttcatgcatagtgtacttgtagggaaaaaaacaataactcttaattgtttaatatcaaacaataaaatcctgtgtatcagtgactgtcaatagatggctttctgtttaaaaactgaagctactccagaagtaggaattaatttatttagtaaacaaagtcagtcaaaccagagccatgtcctggggaactgtcaaaagaatggttcctaagggccagaggccacatccactggtagatgacagaacaaccatacttcagatggcaaaaccggtcagtttggtttgcgttgtgtgcctatcctctttctgtgtgcttcagctgaattaagtgcttggagagctcaaatagttcaagatagccaagatgaccaattctgccaggtggcagcctgatcttgcaattttgattaaaataaagaacattccccaagaacagtttgttgcaaaaaaaaaaaaaaaaaaaaaaaaaaaaa

SEQ ID NO: 58158 - DNA, 2639 bp, Homo Sapiens
gtgcgccggaagtgatcccctgcgtggctgggctgctcgggttagatcgtcaggaaaagcctaaagattagactgtaagaaaagaaaatagaagccatgtttcgaagacctgtattacaggtagtcacttgtctgtattaatactgagatgtattactatcagccacagtgatcagaagacttctttaggcttttaactacaggggcaaaagacctttgagctcacccacccacctctatactcatttgatatggaggattggggacgattttgccagtgtaaattatgttcactaaaacaaaaaaaaagttcaggtttattcacacgtaataggaatcattaatttttaaaatgtgtgtgtgttgcttgaatttaaccagtgagaggacattaaaggtctttagtgacctaaagactgtaggaatcattgttccaacttttttcttaaggcatgtagttgcttttttgaccatctacctcctgtgttgctaaacgttcctcttcccccatctttccacactgaagagagcatctcaagtctcagtggtcaccagagatttcactatgtagaaaatgccttctcattccacttagtatgggtcctcacttttccagacactagcccaccttgagccagcttagactaccatttttcctcacttaccacattcgggcaccagctcctgtagattcttctttggctctcctactccccatcctcctgtgaagaccaatgaagaaccagttcctccatgactctgtcattttccccaccttaatcctatattcttggatccccactttaacctgtatgtatctttaatctatttttttctgtattgaaatgtgaaacatgaaaaagttattgcttcttaacactaacgttacagtattaaaatgtctttaaataagagttaaaagtttaatttaaaaaattatccaagttaaataatcctttcctaatcttctccagtagatttttgtgtgccccaaatgagacattgttattataaatctctgtgtaagatttatgaggtctagcttgtctgagcactcaaatgacatttccagaatcatgacacaggttctcattagcagtttgattctatagtatgttgtactcatatctttattttcttatctgccctctgctcctaagtttagtgataggattagatagccaacagcaccctggggattggtgtttatttgattggtggacttctgctttttatattaacagtactgccacttcaaaaatgtttctctgatagaatggctagctctctgagctctgaattcagtgatgtgtactcccatctttacaggagctcttgaaattaaggaggcagcagagggcttcgggaaagcagtagcattggtgtcaagggccctgggtccttgagatcacttgccacatacttcctgcaggagcttgggcaggtgatgcagtctctctgaggtgttttctcagccctaaatgggaataattttacataacttgtagatttagttttagaattgataatagataaatcccttagctgatattcagtaatgattgctgctattatgtggtagtgactacctttgctgacagtgatgtgactttgacttggacagtcgagtctttgtgtttaatcaaagaaccaaatttattagaccttttttgatgcactaaaaacaggaaatttcctatgaaatatttataaaaactgtattaggctaagctcactactgaagctgtttaatttttgcaatagccttgtgaagtaggtattatgtatcataatttttgcttattttaaaatgaaacactttagattagtcatattaggtatcctaattccttttaaggtctgaaggagcaaccaggggaaggcagtttcatagacacagggaatctgactttggaatatgttcctgttgctgtgtcagaaagtcattcatgtgattagttttagaatgtattgttttgttggaatgtaacctatctctcgttctctaaaccagcagaccccaacctttttggcactgataactggtttcatggaagacaatttttccatggaggaggggggtgccgtggggatggtttcaagatgaaactgttccacctcagatcatcaggcattagttagattctcataaggagtgcacaccctagatccctcgcatgagcggtttataatggggttctgctcctgtgagaatctaatgccactgctgatctgacaggaggcggatcttggtcagtaatgcttgctcgctgcttgctgctcacctcctgctgtgcagccaggttcctaacaggccacagaactctactagtcctcagccctggaggttggggactctcctctaactggctgttcgttatgcctgagagtaaggctttgcatttattccacacctcctgacacttgtttgatcattgcatatgttattaatgaatctacttattaaattattaattataaagcatctcttttaactctcctttggtctaatgatggattaaatcagtacccatgttggatctaaatttcttaatttctaaagtctactgtaaccaaaatacagtagtaatataccagttgtttatacaaaaaaaaaaaaaaaaaaaaaaaaaaaaaaa

SEQ ID NO: 58159 - DNA, 2610 bp, Homo Sapiens
gggagtattctgctttgaattatttattttagtctttctcagatgtcaggacagatttttaagatttgggcataatgtttaaaatgaagatggtatgtctgtagattttattgacccaacttggtccccccaggctgtcctcacctgccccactacttagatgaaaccaggaatggcaagaggagagcatccaagccgcctgcaccagccctcagtgcatccccacccaggctctggaacgagctgctacatgcacgggaagaccagagctgccgtcttcctggctgttgttcagagcttatgctttcttagggaaaagtacaatgtagggctatgtgtgtggtggggatcttctgtgtgtgcttgtcctccccctgggaaatgatgagaggtgacccccgagctgccagctcagtgtcacactcgagtgaacagtagatgatgcttctgccatgcgttttgctggggaaggtaacagccatcgcacacatgtaaattcttgtgtaatccaattcctgtctttgtaattacttggagacttgccatcgcagccaattgagaagtgggagcagtgaccctgggcagaaagcagaaattggagaggaggggaggggcggggaggtggcatccagaacacagttgtagctctcctggctttacagcatctaaaatcacttcaggatcaggaaaaagcaaaaacattataactgccctccacgcaagtaccccagcttttctgtcccaagttcccactccctctacctctctcttagcaggctggaggaattctcagcaagcgtgatagagtcaggtcatccgtgacttagctgagaggaaggacttttactgataagaaactcccattgtctggcaacaggtttctgtagaggaatgtcttccaggtgggagaagaatggctttcatttttaacaaccacacactataaacaaagcatcccgagagcacgggtacctagcagaagaagaacgaagtaagccaggaaacaagttgcttttcagcatccccactgaaatgatagggtactttagaaagcgggtggtggcattctttccacaagtacagcaagtgtcactgtggggtcttaattctctcgaatctgcctttagaaggcagaaggcagaatgatcagctctgctctgaatgtgtttgccatttgattgacgtcggaaacatgatgtcacttctgcaaacacccacgtgagaaggtgtattttttttttttcttatttgggtgacagattgcatgttagggcactaaaagatgaaagcactaaatacttgctttagaaaaacacagtggaagattctctcatcctccccgctgaaaatttatgggcttagaattccatgaaccaaaatgactgtcttcagttaaacttattgcgaccctctgggcatgattacaaatcaggtggaaagggaaggtggaggagtatacggattctttttcatgttgtgtggaatagggcactttagttgaaattgaggttcaagttagcaaaaagaaattccatccttcggctgggcgtggtggctcaacgcctgtaatcccagcattttgggaggctgacgcaggtggatcacctgaggtcgggagttcgagaccagcctgaccaacatggagaaacctcatttccactaaaaatataaaattaggcaggcgtggtggcgtttgcctgtaatcccagctactcgggaggctgaggcaggagaattgcttgaaccagggaggaggaggttgtggtgagctgagatcgcgccattgcactccaggctgagtgacaagagcgaaactccgtctcaaggggggaaaaaatccatccttcttcaatgtgtatcttatccttctcagtgtttaataggacgttctactcaatggattggtttcctccctataaaaaggagcattttgttattccctctttcagatttaatgataaagtcataattcctgcaagccttttgaggaggatatatcttatctcataagatagctgggcacagttgttcaggcctatattgtcagggctttgggaggcctcaaggatcgcttgaaggcaggagtttgagaccagcttgggcaacatagcaagaccccatctctacaaaaaattaaaaagttatccaggcatggtggtgcatacctgtagtcccagctacttgggaggccgaggcaagagaatttcttgagtctaggagttcgaggctgcagtgagctctaattgagccactgcactccagcttgggtggcagaacgaaaccttgcctcttaaaaaaagaagagaggggctgggcgcggtggctcacgcctgtaatcccagcactttgggaggttgaggtggccggatcacaaggtcgggagatcgagatcatcctggctagcacggtgaaactctgtctctactgaggaatgcaagaaattagctgggcatggtggcggccgcctgtggtcccggctacttgggaggctgaggcaggagaatggcgtgagcccaggacggggagcttgcagtgagccgagattgtgccactgcactccagcctgggcgacagagcgagactccgtctcaaaaaaaaaaaaaaaaaaaa

SEQ ID NO: 58160 - DNA, 483 bp, Homo Sapiens
tttttttttttttttttacattttaaaaatcagaatttatttttaggaggacgtaaaccacacagagacagtgaggggcctgtgtgatgtgacagagcctgcactatgttctggcaagggaccacactcacagagacaggcagggactgaaaagtcacatttcatgcggtggcaaaaatcacgctgagtcgccaatattgtgacctttaagcagctgtaaaacaattacactttgaatgtttcctaaagctggaaaacaaacctatactcttacatccgagtcatctgtgctgataagggctgggggacgcttgtcttatcttttcctgtgagctttataagctgttgtgtgaacagagagcctgtctttgtatggctcagatggaacccaggactcaggcagaagtcagcgtggggggcatacctggcctgttttctgatacgcttccagggcgtttatccagccggccaccgggcccttac

SEQ ID NO: 58161 - DNA, 2553 bp, Homo Sapiens
ttgtcttcttcttgacacaaatgcctggaaggtgaaagtataaaatatcttgatattaccaaggaattaatgtgtggaactttcacaattaaatcactactgtcattactatccaataattcattgtttatttctacacctgcagttgcagtttacctggaggtactttgcatacagaaacatttttcatcacttactaagtgagaataggaccctggcctagggggaaaaacaaccacagacaaaccatacttccctgagaagcaggagcatagtgctggctagtgaattgctttcacaaaccgacctcataactctgtgccttagaaaaattagaaatgggaacatttggagatcacttgggaaaacttgaaattatgaatgttaatctgtgattgctaagggaacgtggtatttcctgcctattttgtctgtagtttgtctctttctcttctaattcatttttaaaactctgctagattaattttgctaaaataacgttttgcactcctcttttcctgtttaaaaacatgtagtgactcaccatcagttttagaaatcgatttaaaggacttcatgaaactggtttcaggccacccacagtttggcccatacctatctcctgttctccttcataaacctttcaaatctagccaaattgctttgttctttgtccctggagtatggctttctctttcttctttctttcttttttttttgagacacagtttcgctcttgttgcccaggctggagtgcaatggcacgatcacaacctccacctcctgggttcaagcgattctcctgcctcagtctcccgagtagctgggattacaagcatgtgtcaccacacccagctaattttgtatttttagtagagacggggtttctccatgttggtcaggctggtctcgaactcccgacttcaggtgatctgccggcctcagcctcccaaagtgctgggattacaggcgggagccactttgcctggcctggaatatgcctttttctattgctgtgctttattctgatttttgttttagaatagctttcaaatcttattctgtttctttaatctctcttgtgtctctctttatgccttctgggcttcacatggggactggtgtggttgtaaaggccccctgagttgagatgtggaagcaccctctgttacagagtgagggattgactcactgaaaagaactattcaagtcattcctgaattgcttacctttggtacttcttgatttagtaaagtagatttcctgttttcatatgaaaagcataattgaatcatagagcaggtactaggaatcagactgtctgggtgtgaaaccccactctgacttttactagctcttgaccataggcatagtttccgtatctctaaatgcatgtaagggtccctgtctaccttgtagggtggttgtgaggataaaaacaatacacagcacatgataagagctcaatgaatattagctgctgcctttgttattcgtattcatattattgtagatattttctgatgaatttgatactcgttcaccatttacttcaacacatttcaagttaaaagatatttcctgctttgagaataaaattatttcaagttaaaataaaaattaatctaatatacccttaagtagtaatgaggcatgtagttagtgcactgaagtagttatgtgcttcccaaagtgggaacttaaaacaaaggaatcttttaagcttaacaattccttatgttagtcatataattatcccttttctcagaagcctggggccaaaaggatctgttcctaggagaaaggaactgtctctcctggcttaacaaagattcagtttaaaggctagctaccctctgagtcatactgctttctgatcttggagtgcttgcctctgtcccatgagaaagaaaggtggatgaacagcacttgcaggaaggaactttcatctttcttgaagccaatccaaggcctcagatgcagaaagaatgcctaccttacctcttcaggggaaaaggggtttgataaaggtgctctacataatgcgaatctgttttcattaattcatgcattcatctactcttttattatgcattcaattcctcaaccatttattgagtatatacctggtgtcaagcactgtgctagctactggacacgtcaaaaggaaagaatgagattttgtcctctgccttgagattaaggtagtttttttgtttgtttgtatgttttaacataccaagtccagtgaaatcttaaaatattttttatatggctgggcgcgttggctcacgcccgtaatcccagcactttgggaggccgaggcgggcagatcatgaggtcaagaaattgagaacatcctggccaacatggtgaaaccccgtctctactaaaaatacaaaaattagctgggtgtggtggcaggcacctgtagtcccagctactctgaaggctgaggtaggagaatcgcttgaacccaggaggtggaggttgcagtgagccgagattgcaccactgcactccagcttgggtgacagagtgagactccatcac

SEQ ID NO: 58162 - DNA, 622 bp, Homo Sapiens
  misc_feature (487)..(487): n is a, c, g, or t
  misc_feature (594)..(594): n is a, c, g, or t
ttttttttttttttttttaacattacaatactgttttatattcaaaataccaaaaatcttctgtatagtacttatcatatatatcaaatgacttttaaaagagtctcagcaaccatatctactatcttaatctcttcagaacaagcacataaggagaaaattctataaatcagtcctcgatgacagagggtttgtttaggagtttaccaaatggaacaaccctgctggaattccttcaagtagcctgtgaaaatgtcagaatggagtctgttttggaggtcatagtccctagagagctctgagttttggcctgtttgtcttttcacatgctttaatatttgaaaatccttttttgtagacactgactgatgcccagagaatgctaggattgtgggaactggcagtaccaacaagagatgaacttcatgggaaatcagtgcccactgcctttgccctctcagcactcatcagataagctgctcttcanatgttatgaaggtacatggtgagacattaagaaactgaatgtcattttgcctttttacaaaagaaatacttgtagaaaatgggagcaaaagttactgggacgaccanaagaaatgctaagtttataaacatcatg

SEQ ID NO: 58163 - DNA, 2372 bp, Homo Sapiens
ccacgcgtccgtttttctattttaaaaaagtaatttttttactttttaaattttttttgcttaaaaacaaaaacccacacattagcctaggcctatgcaggctcagcgtcagtactccccactcttttttaaatgttgtgaaatcctcacctgcatcctaagtattgttgtccccccaactcccactccagagaaaggaagtgatttaccactggccacatggctagctcatgccagctcaaaggccagagctccagtgctcatgatctccatcgagctaccaaagagagttcatctgagcaaatccatatgcaccacactgtctcagggccaccaggagctcagaaaagggagctggcttttgccaaagaagtaagtgatggcaaagtagaggacacatgacttaagatggaccttgaagaaagaagaacagattaggatatttgaagcaggggccatagcacgtccaaagacagaacactggaatttgtgaagagtgcctatccctgggtgggttcacacagaggctagagtagaaagctaaatagggctaagttgccaagagccttgaatgccagcctgaggagaatgaacttcatcctgccaaaaaagacaagggtgagtgggtggtggtgagcaaggctgtattttaggcaggtgagtcagtaacaatgaggggagaactgtcagtcccccaggaggggaagatgaattgccacactggcagtacctgtctccaaaaagtgtgagactgcacaggcaccttccagagcatgggaaggcggtaagggtaacatctgaataggaagatgagaaacctttgcttctatattggtgtcaagacatcaacagacttgctgttgaacctgttggactggtcaatctaggtttaaacggcagctctcctacttactagctgggcggctttgggcaagtgatctaccttctctgggcccccatttccttgtctggtcagtgcagtaagtgttgctcactgtaggctgtgtccggcgcagttcctagctcctgatgacagttgagtcagtggtggctctgtgtattgcccccatcctgctattttgtttgtttttgccaaatccttataggctaatcacacgttttcactttgcttctcactaacaatttgtgatagcattctttctcccaaagagatctccaaaccccttagcaattgcctccagtgagttccccttggcttagtgggctttaactggttgttgtaaccaaaagtccatgtggacctctctgtgggtgtgaccttcttggcatctttcttataaccacaaattgttctgtccccatatggaagagtgaccgttcccctttagctagtaatggcaccttagcatcttcctcctggcaagggcccctgaggacctcagcctttcccttgggctctttctttgctaatcacagcagccacaactgaacctgtctctggggaccaattgaggcagttggcagcttttattttctgccccacacttaataagttgaggaggggaattagggtatccacacagctaactgccaattacctgggctgtttctagagacaaatagttccccttagttggtgttgggtttcacccagtgtctgtgtactaattaaagtgcttagaggaactaccatcccagtgccctattgcctcttgacctcccaaggccagaaagacgaggtttaagtgagtctgggttctcagacgcagacaagatgactcagtgtgcagccctgcctgctggtcaccacggagacctccaaatctcagaatctgcagtcttgcctactgtttctctgtgtgcatttggcaaactttttaatactagcacttttggcagtatactccaagcaatcaaattgtttaaaacaatattaagcaagtcttcatgtctaggagctttcacagtaactgcttgctccactgccctgactttctggcacacttgagatacagctgacatctctttgcagcagcatgctgtctcggctttaagctttgttcagaccctttccctcagtaagtcataccctgctgacttactgggccttacatgggcctgccacttgttgctgcaagagtgtttgtgcctcttccttgtataagtggggcgtggattgagcttcagggacgcagcatagagcctgtctcctcctgataacattcgtccacttgaaaggggagtctcaggctgggcgtggtggtgcacacctgtaatcctagctattggggaggctgaagcaggagaatcgcttgaacccgggaggcagaggttgtagtgagctgagatggtgccactgcactccagcctgggcaacagagcgagactccgtctccaaaaaaaaaaaaaaa

SEQ ID NO: 58164 - DNA, 2334 bp, Homo Sapiens
tttaaataaactcccagtagtgaggagctgtggaacttctgattcagaccatgagtcagaggaaccaaattctcacccgggagaccagccctttcctcagtcgagccatcagtgcttcatctgggtcctctcacttagacaccctgtaatttattcttaatttctgagatggttttgtctttttcttcagtttctttcctgagttcaatcccagttctcatttcatttcttgcttttttgggtctaattctgttcttgatttctgattcccggtgttttttcttgcttgttgttttgatatgtttccagatgccctttgaggagatgtgattccatttggaacgttgagttttgtgtcttctgccttttgcttgtttttaggagggataattttcatcagctgaaatgctttcatttacattttttctgttttcttcttatagtagctttctatggagtttggcgtttttctacttgtagacattctgtaggtgtatattttaggtcagtgagctttgctttattgattggcgacaggtatcttttcagtgggcattgtgcctcgaggtggtaggtggggtgggtttgcctttcctttggttttgcaaatgcctggattttgctcttgctggcagttgtgaggtgtgtgcggaggtctcccccatttcctgttcacgtcccccttcccatcggccgtgctgctccgacctcctctgcctcccagctccttcccctcagttgtttgagtggcccccaggatttggcctcgcagagactttctctgtctgagttttctttcgggctgtgtggcatgctctgtttggatggtgggctttagctttcttcctgccttccagactggagagcaggggctggggcccgtgtgtcctaggaatctgaaagtcgtggtcctgtgtcagttgtgtgtgtcagtcgtgtgtggtccatgttggttttggggtgttttgggaagatgtgtggagagagttggatctgtgagacccagaagcacctcgtgtttgtccctgtgtgatgcgaactgcatttcttcaacttactacttacacgtggatgctgtgggcttttgaactccagatggaatccttacctcagtaaaccaccgaagccctcttcaagcagtagaacctatctcaacgtccgtccacaaaaagcagagctttgtgctttcacccttttctactcaagaaggtatgtgattcttcactttcttaaaatccttcatcaatggttgtgaaatatggtttccttatttaaagccatttctttctttttgtttctgttttcatcagagatgtcaggtttgtccttccacatcgcttccttggatgagagtggggttctcaatgtatgggtgagtagtggcccaggccgggcacatgcggggcctgagtgaggtggtctgggtggaggtggcgcctgaatggcgcagggggcgggacccagttagctgtggtgggaaacggagagcaagactgggcttcttggtcctgagcagaagggatgcagaaggccacacatggcaggtttggggccctttcgtgacagtgaaatagggactctcacacagggctttgggaacgcggaatgaaagtgagaagggaacaaaatgttagggctgaggtgatgctggattggcttgtcctggaggatgcgccaagactgttgattaagtcaccaagtgaagagaacacgaggagatcaaagcaaaggagtcaacttgtagagtgttagttctgaggctaaagatcagtctctttttctggagcagttatgttttagtacctaaatagcactccatcttaattagagctatgctttgcttaggttgtttcataattataaaatgtatcaatattcattttcaatattctgtttttaggtggttgttgaattaccaaaggcagacatcgcaggttcaataagtgatttaggtaactattaagtaaaaaaattaattttagtgttttctaaaatgaatcgagattaaaagtactgataactgcggtcaggtgcagtggctcacacctgctgggagcctcagcacgttgggaggctgaggaaggaggattgcttgagcccaggagttccagaccagcctggacaacatagcaagaccccgtctctacaaaaaaattcaaaaattggctgggcgtggtggcacacacctgtagtcccaactgcttgggaggctaaggtgagaggattgcttgagcctaggagtttgaggctgcagtgagccgtgatcatgccactacactccagcctgggtgatggaatgagaccttgtctctctgttaaaaaaaaaaaaaaaaa

SEQ ID NO: 58165 - DNA, 2313 bp, Homo Sapiens
tgtttctaccacaagcaaaatctcgtaaaacagaagcattttgtttccactattgcagagaaacaaagttgtttaagatgagttaagatgtctcagggttttggcagtctttctaagccccctgctgctgttacgttcagaatcccttttgaagtggcctggaagtttctatgcaatttcagtggctgcttaggggaaatattggctaaactgctcatttcgactgttaagatggatcgagtgttttcagaatgttttcgtttgctagaaatatgttttgcactggggcttctcttgttgaagaaggttggttaccagccatctgaagatgcctcagggtgtttacagaaaatgtgggtgctgtagttatatttgagcacagccctcccccaacaaagatagtgtggtaatcagcaggaatgtgaaaacatgtatttaaggattgatgcttgtaaaagaggtgctgtaaagaaacatggttgttcagatgtaagaaatgactgacagctctctttgtaggcatgctagtaacaataaagtctagaagttcaacatcaaagcgatcacagcttactccaccagtgacttgcacatcaaagagggagcacaagacaaaggaagtgcactgaggtatgtttctgcctcatagccagatcctcagggggagctcccagagctcctttcatgaatgcatagtgatttttgcagatcagcgtcttcatttcataaatgaccaggaatataaaagcagggcaaatgaacgccataattgctggcatcactttaagtttggttcggaaagattcatcacaggagcgattggtctctctggtttccttgagtagtgaattctataccagtgtgggcaactctaacttcacctaatgtagtacagggaattattcacaaaataagagaaaacaaagtggatacatttcaaattggtggattggaattatgcttgagaacataaaactggacctaagttagtgcagtatgcctcttttttctttcctgttgattgcttaattttttgagattaaccttgtgggtggatgtctgctgaatcaggtgtgcattacttaacaggtgtgtgacataatgaaatttagacctgttaaaccagctcttaattaatcaccagatctatgcttcagttctctaactcaaatcatgtgtactccaaaatgccaaaagtagaacaggaagaagagtctgggtttgactttcttctctctctcttgatattacattgaaaataaaattaaccatgcaagtattatgagtggttttaaataatgtgctttttttttttgcttgcctttgaaatttaaagttcttttatagttcatcttcagtaatttactcatttttaagtgctattgaaaaatagtagtgctctgtgtagtaattaataaatacaaagcagctttctcaaggctctagggagacctaataaacacaactgtgttactaattgatgctatactgagctgacaaaagtagtgcatcggtaaacagaagttagaaagcaagaagttaaagaactataggggattatgtagacatcaagggttgaaaattataataaggcctctttaggggagcattaatttgcatggggctgaattaggacaaccaattatttctgaggacactactaagagctcatccaaaatacccccaaagtgaaaggtttgggagagagttgggacttaggtgagatggagggggcactgagcatgtcatatttcctataactcatggtagttcaatagttttctcaatagcatgttagaatagctagttttctttgttaggagaaaatgctgatgaaatcaacagtactgtaatttctttgttctatacacacagtttatgttgaactaccacaatggaattttttttttaagcaggaagggcaggagagtggagacagaaataaaccttttaaatcttctttacgtgaaccccacaaggacataagcatttagcagattagagagcgtttggatttatagatactatcctctacagtagtggtcttcaatgtgtgatccagggaccccctgcggggccccaaggccctctcagaagctccaagagataaaaaccagttccataacaatactgaggcattgtttcccctttttactacggtgaccatttgtattaatggtgcaaagcattggtgggtaaaactgctggcaccttagcaggaagcaggacggtaatgccaagctgtaccagcagtcatggtattcttcattactgtgcagttgctgttaaaaaaaaaaaaaaaaaaaaaaaaaa

SEQ ID NO: 58166 - DNA, 2189 bp, Homo Sapiens
caggtatctttacagcagcaccccactctctgtagtaccaatttactgtattagtctgttctcatgctgctgttaagaaatacccacaactaggtaatttataaacaaaagaggtttaattgactcacagttctgcatggctggggaggcctcagaaaacttacaatcatggcagaaggcacctcttcacggggtggcaggagagagaatgagtgcaagcaggggaaatgccagatggcttataaaaccatcagatcttgtgagactcactcactatcatgagaacagcatggggaactgccttcatgatctgattatctctacttggtcacacccctgacacatggggattatggagagtataattctagatgagattttggggggacacagccaaaccatatcaggcactaagcatttttccccttgaattgtgggatttctttggttttctttttgtcttttgggtgttttttggtagacatatctttgttctgccagacttgagagcagggtctttatctgattcccactgactcacaaggtgctaaccacttggtcttatacacagcaagtgttgaatacatacttgggttcttatttacttctttttttattccacagggatctgtgtggcagcagggaatctattgctaatgatttgagtagtctcagctatgctaatataccagataatgatgagggtgattatttattcagtaaatgattgttgagcacctgctatgcgccaggcatagttctgggcatagtgcaaagcagtgatgcaaagtttctgcccttcaggagcttacattttactcaggggagacagacaataaatgaagaaaaacatttaattccacagggaatttcctcctagaggtgcccaggctctgtcacctggcgctctgggtccacaggtgtgtttcccttttcccgtggttcatccctgtggaataactcagcacttcctgtgtcccctctgccccctcacagatccactcacacaaaagaatttgtgagcgaccaagacattagagagcttacagggagccaaagcaagggcttcactttatactcaactgttaataccaaagcgttcccctgttgccacttcctcccaccacacagctcccaagtgcagatccctgagggatgtttttattcctgaccccagcctgcctgcccatcttggtgcttggtgaacgggcacatggagcccacccttcccagaagcagtgggagtacagacagcaaatgaacaaagcagcagccttccttccagtgcctcacaggtgcagagctctggacagtgctgtgagggaggttgttcccactttcccctttacagatgtgtttccatgtcatgccgttgagatgttagactggccaagggcttgttcatcagattgcttctctctcttaactccttcaccagtgatctcagtccatgccatggctttaaatgtcattcaggtctctattcaaatgtcacttcctcagagaccttccttgacaaccctgtctgaaatagcacatgcatgcacatataccccttaacctgctttatttctcttcatagcatttatgttaatatctttttcgtttattgtctgtctctgaaggtagggactttgcctcatttactgcttttcagttcttggaacaatgctcggcacataggcaatcaacgaatgtttgttgaataaatgatttttttctctggaaattgtcaaaatctgcatgaggtgtatcaggccagccattgtcagcctcagtttagaggcaaggaaataggttcagaaaggttcaaggacgtgctgaagtcacagggcgaggcagcagcagagagcctgcttgttgagagccaagtcttatgggacttgcctccttctctcccactgaggctggggacaccaggtggcccagaggcatgtggatacctccagtgggaggttaggagagtgctacacagaaactctgagttctaacactcttgggaccataaaaaatggaacaagtctgggcatggtaactcacgcctgtaatcacagtattttgagaggctgaggtgggaggatcacttgtggccaggagttcgaggctgcagtgagctatgatcctgccactgtactccagcctgggcaacacagagagacctcacttctttaaaaaaaaaaaaaaaaaaa

SEQ ID NO: 58167 - DNA, 2149 bp, Homo Sapiens
agcggaggaacacttgtagtcacagccactcagaaggctaaggagggaggattccttgggttcaggaggtcaaggctgcagcaagccatgatcataccactacactccaatctggacagctgagtgaaaccctgtctcctcaaaaaagaaaaagaaaaaaaaagaaagaataagaaaactcacaaaatcagagaacttctccccttctagccaggcatggtggcatctacctgtagtccaactatgcaggaggatcacttgagcctaggagttcaagtctagcctgggcaacatagtaagaccctgtctccctaacaatttaaagattttaaaatgtttaatctttttttaaaaaattgctttggaacttttcccagttacctttacttgtagaaaaagtcttcagttgaggaatatatgcaaatactcttttataagaatttttattaaagacaatgttgatccaaagaccactccccaatcaagtcatcatagacctgtcttaatatgcagttgtagtagcaaataattcctggttctaaggagattgatgttgctaatctctaacaaccataaagtgaatgtacttctacctgatctttaaaatgattattcaattttagatttaaaacatcatttcaatcattgtaaatgaaatattttgatttaaaatccattatttgataatacaagtaacattctcagatttaaaaaataataaacttgtttcaaaaatatgtggactatgatcagaatttttattttttttaaatacacaagaacaacttgaaacatttataaacctctaagttactttcgtgaacatttctcatttattgtagtcagagttcctttctacaaaaagtaactctatgcccaaaatatgttgtaaatctctctgcatatatttcatctacctcacaaaaaaagatttatttatattaaagaattggttattatctcatgtaagatgctgaagccttagaaaattacaaattagtcatcatagtttattagtaattataggtatgaagaagtacaaaccaagtatagatttatattaaagcatttgaaaattattttggtcatgactacaataataatactgaattgaaaatcctcttaactacatataagaaccctattcaaagagaatccctaacgaaaaagcctagtattaattgaaaaacagtgaggaatgttttgttttgtttttggtaaagacatctttaaaaagacacatcagactgaatagaaaagtaacttttaagattaatatactatgacccaatagggtttaattcaggaatgcaaggatcgttcataatacataaattaattaatatcatttactctaccatatcaaatatgaaaaggacgtgataatactatactaacctcttaataagctagaaataaaaggaagctttagtggtacagtatgtctatcaaaacaaaatagcaattatatacctgagtttcatgaaacataagagttctccatatattggaagtcaaggatttctccatactattatacgatatttcctatagatctagctagtttggaaacaccagaataagaaatgaaatgaataaatataggaaaagaaataagaaaattataatttgcagattacatttttaaaaaatgtacacattgtgatttcaatttattggtgacaaaaattaaaaattaaaataaaaatttaaaagaatcagctgaaaaatttaacatccaataagatcatttagtaaggcttgagatataaaataaatatgaaatcagttgccttccaatgtatcaccaacaaccagttaaaacgaggaaaataaatgctattaataataaccacaaaaattacataaaatctaattaaagaattaacaagtaatgtgccaggtttttaaaatactgtattttactttgctacaaacatgtactagaggacatagaagatcagaacaaatataggagacttgtcacatttctgatggaacatctcgctgttataattaggtagttctctctaattacgttcagtataattcctgtaaaatcccagtgaagctctttctagaatttttagagtaggtcctaaagtttggctaattatttatgtaaaaataggcaaaaaaaaaaaaaaaa

SEQ ID NO: 58168 - DNA, 2021 bp, Homo Sapiens
gagagagcgagagagaaatccggttaaaatcagagtcggagggaggtttaaccacagatcggttccgatcggattattccttaaaggggacgcgccattgtcaagagaacggagccaggggcccgagggcggggaccggcggcgctggaggagcgaggcagctgtactaggactgggaacggcctagaacattccatattctgcttcacacacggtgactcactcactactgctttgtaccagtgtgcccactcgagtgcctgtaaagtacaagctccagatcaaaaaagcttctagatggatcctttccaaacttggtgtcttttctacaaactctgtgcctcaacaaccatttctaagtgagctgaagccatttattggtatcttggatggttaacatctaaatgcttaattcctgaaaccactcaagagtcataggattagatgatccaagtcaccaagaaattactgtctcaagtgatacgcttcagcgccagtcagcaaagtaaataaatactgtgcttcttccaactttcattccacttggggaaaaaaaaatatcatcatgtcaaacattacgattgacccagatgtcaaacctggtgaatatgtcatcaagagcctctttgcagaatttgctgttcaagctgaaaagaaaattgaagttgtaatggccgaacccttggagaagctattgtccagatctcttcagaggggtgaagatcttcagtttgatcagttgataagctctatgagctcagtagcagagcactgtctcccttccttacttcgcaccttgtttgactggtacagacgccaaaatggaacggaagatgaatcttatgaatataggcctcggtctagcacaaagtctaaggggtaagtgctttattttacactgtttcacctggaattaacacacttccaatgaaggggtgatattatcaactgaaggttgttattgtttgattcctaagcaaactgcgttgattacttttgttacaaagatggtagtaagggagaaggatagttcacacataaactgtaaatcaagagaaggtaccagttaaactagatgtagccctacagtactcatactgggtatcatgcaaaaattagtaatacaaaaacctatttaggagtgccatttcagcagttcagtgaggagcttttaatagtcataaagttaagaaaatattcaaagaagttcctgttcatatggtttatgaagggaggcaattattgtaatacaggaagactgccaaaaccctgtgttataatagtactatgatactgttcttggagctcaattcctagaacttgttttcttctccttcaaatttcccaggatgatcttgtcatgcatgtaagagccacgtgtgttcaggtgattgtccatggtttagtgttggacttcagtagatgccacttgtgatttttcaacttaaatttgtgagaaggataccttgtactgtattttcatgttgaaaagttaatacttttgtttcagttcttaataaaatactagtaatcaaatatggaacaatgctacattttctaaatgaaatttaaaatacctttcttcttcttactaattcttttaggttaagtttaaatgctaacagatataatagtgaactctgaataaacaccccgtatataaaaagggaaagaacataaaaacatgtttttgcatatgttggattattaaaaagcttcagaccaggcactgtgacttatgcttgtaatctgctttaggaggctcaggcaggaggatcacttgaacccaggaatttgagaccagtctgggcaatatagggagatcccttctctagaaaaaataaaattagctgggcatggtggcgcttgcctgtagtctagctacttggggtgggaggatcacatgaacccaggaggttgaagctgcggtgggccatgtttgcagcattgcactccagcctgggtgacagaacgagaccctgtctcaaacccaaaaaaaaaaaaaaaaaaaaaaaaaaaaa

SEQ ID NO: 58169 - DNA, 1960 bp, Homo Sapiens
tttcatttttatagcaacctggtaagtaggtattgttatccttatttagtgtggaaaaattgaacctaaaggatttacagtcagctacatagccaatgtgtgagggccaaaattgcacttaacttcaaaataggtctttacaccatttaaaaatcaaactaaattggatcaagtgtagataacagtagctacagggaagcatgaggtgggtgagaattagccactctccaacgtagtccctgccaggatataatgaaagcaagtttcagactaaattctccacacacatacttttaaactgtattagcaaggaggccctaagcaattcatcagtccgttctgtaaacattcatgaagtctcaagtctttattcttttaggttcttctaccaccactctgcagaaaatatattgcagtcagcttaactatattccccaataggattctactacccttaaattcagcatcaggcaccagaaatcatataatccaccagcaggatacaggaccaatccagcctcaggcagcacaccaaaggcttcactcgatgactattccctgttcatacagggtcagggaagcctatttataccttgaatctcataagtagtgtctgttttttagaatttatttttctgatcaataagccattaatttcaccaatgaaaactcatttctgccattcattaattcatatcttaatcaatggacagtggagttgcatttattaaccagtactatgtctgaccttcctgattagatactagctgttcactcctaaagtgtatatttctgactaccccaagggtttaataaacaaaaatctacatttgtatcatactgtttatgatgtagtaaattatacatgtcaaagcaaaggacacaagcaaatccttagcccagacactagatgtagcgggagctcagctgaagactgaattactatcgcactagaattcagcaccatcttgttttgtgctttagttatctaattgcttcgtgtgttggatttggcttcttaatcagattatgaaattctcggaaagagagagttatatactgtttattcttctacaatagctagcacagtgctagatacatataggtctagaatcaatcatttttaattattaaaattcatagtaataccttacaaacacttggcccgtaggattctatagttgctttgagattctaaagtacctcagtggactacaaaccttaagaaattgcctgactgacttgagtgatggaaatggtatattttgtgtagattttctcatatcaattcacagctttgttctaacaattattaaacttcattgggatatgcataaagtatgaaccataataaacaatcatgcacctcataacgatgttttggtcagctatggactgtatatgtgacagggatctcataaaattatactggagctgagaaattactactgcctagtgacatcatagcacaccaccttactcacgtgtttgtgatgatgctgttgtaaacatacctgccgcacttctggtcttataagagtatagcacatacaatcatgtatagtacatacttgacaatgatcataaatgtctgtgttacaagtttatgtatttactatgctatactttttattatttgagagagtacatcttccacttatttaaaaaaaaagttgattgtaaaacagcctcaggcaggtccttcaggaggtattccagaagaagacattgttatcatacaagatgatagctccatgcatgttattgaacctgaaaaccttccaataggacaagatgtggaggtgggacagtgatactgacaatcctggccgtgcgtaggcctaagctaatgtgtgagtttatgtcttaccttttaacaaaaaggtttttttaattaaaaaaaattaattaaaaaaggaaaaagtatatataataagactataaaaaaaaaaaaaaaaaa

SEQ ID NO: 58170 - DNA, 1990 bp, Homo Sapiens
agcggggttaaggataaaagactatctatggggtgacaagtgcactaaaatctccgaaatcaccactaaagaatttatccatgtaacccaaaaccatctgtaccccaaaaactattgaaataaaaaaatagtagtataccagtgttgtgacaagtgccttattagtaatatatggtgttaacatcagggaaaactaagtgaggtatgcaggagctttctgtgctatctttgtaacttctctttcctttttttttttttaaagcagtctccaaaatgcagactcattgatcaattttagatatcccgattgtttttggtagaatgaaaagtaaaatcactgcagcactgagagttgcctgacctactttagtgaagagctgattgtgaagggctcttgcttttgcctcattctctggaagatctgctgagccacacgaggggtctctttgtagtttggatactacagttcttggaacgttagttttgtgaaatggcactccactgtgctttgtagagtacccgtggctgagctcgggctactcatgcacaccgagccacgccagcttgcttggggaatctacacctttgccaaggagactctggcgtggggccttcggagtctagatctggaaagtggaaggaggggtggtgtgtttgggttgcttgcccgtatctcttcggaaaagtccactgagctgttctaatctttatgttgcctgtgcccctccttcctagatacgtcatttctcattaaagaatatgcgtatttttatgtttccagtagacattgccaaattgccttctgattttacactcggttctagtccacattcccaccaactttttaggaaatttctatttttctaacctttctcaatgtctgacagttaaatgaaaagacagttcctcaatgggtgaccttgactttgtgattttggtacttatagtgggggtatttaaacttcgtaacactacattaacaccctataaacagcagctctccccataataatgtttatgacaacagattgtttttagagagtgacatatatatgggtcttatgtaataccttctctgctataggcaccaatccaaagtcagtttccagaaaaacattttaatcctctctcaccatggttggagaacaggttttgcatttaatcaaacagtatggtttatggagagtttcctggatggttggttttcagagccagcgttgttttgtgtttccttggtaattccaaagaaatcccagcatcctacgtacctttggcctccatgatggattgaccatgattgggtgttagatggtcagaaactgagtgagatggttttttttttttttctttaatgagctttccctttttttgctttaaaattttcaatgtaaaaataatgacatcatagtctatatttcatgtaaagtattgtggcttaacatgtacaaagttagaaaaatccacaagactcatttgctgatctaggtctaaagatttattttttggatgactataaaatttgcagagttagaacatttcaagaaagtttctcggctcgatgcggtggctcacgcctgtaatcccagcactttgggaggccaaggtgggtggatcacttgaggtcgggagttcaagaccagcctggccaacgtggtgaaaccccatctctaccaaaaaatacaaaaattagctgggtgtggtggcaggcacctgcaatcagctactcgggaggctgaggcaggagaattgcttgaacctgggaggtggaggttgcagtgagccgagattgcaccattgcactccaccctgggcgacagagtgagactgtctcaaaacaaacaaaccaaccaaaataaagtttcttttactctcatcttttttttttttttttgaataaattccagacatttaagcttctccttttagctgtttctgtttgcttcctcagaggaatttaacgagccgcaaaaaagaaaagaaaaaaaaaaaa

SEQ ID NO: 58171 - DNA, 1933 bp, Homo Sapiens
gatagggtgatacatcaaaatataaatggaatgtaattagtcccatgaaatatatgtatacattccccacttttgctatgctagcctttattcactttcctcatttctgcctttctacacatttacttcttgtcactctgggatgttatctttcattttcatttcattatcttatcctttattcccctccttttccaactttcctgttttaataagagcatttttccgaagtatgagattctcttttgattcattatttgatttacttagtcacattttcattttttattttttcaggttcgttcattcccacccccattccttcatccatgtccccgttgtctcttgctgtagtccacctttttccttctgggccttatttaactgtcttttgatatctccccttcctgaggaccttctgtttcttaatttttttcctcttgtctccttttttgctcgtttcttaataaaatggtgctctgagtaaaacgcatgttgtgtgcaaagttctaaatttttcttaatcatagcaagatgaataaggcatggttcttgcctgtaaagaaggcagcattcacaaagacttttatttttattttatttttatttttttgagacggagtctcgccctgtcacccaggctggagtgcagtggtgtgagctcggctcactgcaacctctgccacacgggttcaggtgattctcttgcctcagcctctgaagtagctgggattacaggcatgtgtcaccatgcccggctaatttttgtatttttagtagagatggggtttgccatgtaggccaggctggtcccaaactcctgacctcatgtaatccacccacctcagcctcccaaagtgctgggattacaggcttaagccaccacgcccggcctaaggctttgttttcttattgtctagtatgccaactttaactgtgccaccgcacccaggagcattcaaaaagacttctgacgcacgcctctaaaatgtatcctgttcgtttgtcagctgggcccttaatattttgtgataatttttttactcatttctaattgtttcactttcacacttgcctcattttcttttcttccctgaagccccatctcagtcaccattgtgttagaagctggcttgcctccagattcacacacaaaaaagataccattgatcatacattttctcaacttttgatttcctcttctctcccttcaagccccacacttcacctggtaaatcgtccagtacatctcaagttgcatacattcctacctcattttctatttcacaaggagtggctcacctccttgcctgtggcatagtaatttttatatgcccagtacctggctcacgagaggaacttaaacatctgtggatccaaattaaggtacattttcccacccgtactcttgaaaccatttcctccactctttatggcccatcacttacttttgccatgttttcatttccttgacttatttttgttagtttttgagggcagaatttccatctctgattcccaacatcttagtaagtagcagaaattctcaaaacagttttgcaatgagagaataaacactgaatccatcatgttgtctgctatgaaaactggtaacaggctgggtgcaatggctcacacctataatcccagcactttgggaggctgagggaggcggatcacttgaggtcaggagttcaagaccagcctggccaacatggtgaaaccccgtctctactaaaaacagacaaaaaaaattagccaggcatggcggctggcacctataatcccagttactcgggaggatgagtcaggagaattgcttgaacccaggagatggaggttgcagtgagctgagattgtgccactgcactccagcctgggcaacagagtgggactccatctcaaaaaaaaaaaaaaaaaaaaaaaaaaaaaa

SEQ ID NO: 58172 - DNA, 1613 bp, Homo Sapiens
agcggattacaggcatgagccaccgcgcctggccgagacaatttttaaaaagacatttctcaagagagttataagccaaaatttccctagccccctccaactcattctgtccttctcccagtgcatgtcaggacagggaagaaggctttaaatcagattttaagaaagaggatacattggtttacaacctttgcctatcgtccagagagtttctgatcttttctttttttttgagacggagtcttgctctgtcgcccaggctggagtgtagtggcacgatcttggctcactgcaagctctgcctcccgggttcacgccattctcctgccccagcctcccgagcagttgggactacaggcacctgccaccacgcctggcaaattttttgtatttttagtaaagacggggtttcattgtgttggccaggatggtttcgatctcctgaccttgtgatccgcccacctcggcctcccagagtgctgggattacaggtgtgagccactacacccggccctgatcttttctttgacggtggcagtatctcattttttgataatacacatgggtaatggcaagctcttgggaccccatgccaagcatcaagatcccatttacctggtgataggaaagacagacattcctcaccctttctacccacacccttgttcacagggatgactgtaactaaggtctgcaggtatttatgcttaggagaagaaatcgtagttcaattcaccaggaatatgagaaacaaaagaaagccactatgtgctatgtaaatgtctggccatccaaagccaccttatgcagaggaacactggaagggccttgataaatttctcataattattatcgggcctctttgtgattactcacatttttctcaatataggggaaagatcagcattttaccaaatccacaaccatcaaacaaacaagagctttaatattgctaaagaaaatcacacagctgagcagattgatgtagatttgaattcatgaccacctatcttaactggaccctcagctctgcctagctagtattcattctagctactagttttgattatttgtattgactcttttatattttctccacattcctcaaatatctcaccttcccccacccctcagtggacaaaaaaaaaaaaaaaattcttcatgaagaaaactgaagccttcaaatagaaatttcctcaccttcaaggcaccaaagccgcaacttacctacccccgctcctgcctgctcctctccccatcccttctgctacaacgaaggaagcagtaatggctccatcaatggcttctcacacttggtgtcagaggccttcacacgagggtttgcactcccctacaaggacatgaagactttctagaaggtaggtggacacagatagttttaaagtaatcattttccagagccgccttctccatatgttcccctccttatattggtgggcctaagaagccacaggcctgacagctgtccttcccaacttccactttcccagttgcctcccctccctcattctgaatcctactctggctccttgctctgcgctgtaaaaaacaaataaaagggccacttgagaatgcaaaaaaaaaaaaaaaaa

SEQ ID NO: 58173 - DNA, 1550 bp, Homo Sapiens
catgaatgagtcttcttaatttaaactgactactggatggcttcctgttatgttaagaggtagcaacttaaacatagagcattttaaaattgagctttaacgtacatcagagcctaagatttgactctgattttgataccctgagtaaacttaagcacttttctccttcattcactttggtaaatgagctgtgcagccatgctcttctcgtaaacttttacctgctgtgctaggctgtgagccacgaagtgcctgcactgccctgtgccagtgtctggaacattctccaagtaattggccagtgcctgcgcagatagaatgcaggtagaatgccagttctccccaacccttgccattgatctgcatcttgggaggctgtgcaaggagttggaggatctggggttttcccagtgtctggtcactgaaagaaattttttctttttagtgactccaggttagtgtctgagaaaagttggccatcaaaacaggaccagcccgagcaggtttgaagataaaaatcaatcattccgttcatagtactttcttatttcatgttcctttgcttccaactcccataaggaatttgctaaagatacaacctcagagatagcttaaggtggagagaaattttcgaccataagttccttggagaatacgaattcaagtagggtgagtgggaagaggtttctaccaacattttctccttgcatctcaggtcctgaatcttccaaaaagtgctgcttgtgccctacactggctcaaatttgcatttctgaaactagtttggtttgcattaatttcactggagttgtgatcacattgaaaatgcaaagcctaattgttaattaagaaaagtcattttgagatgtgatggtgttttatactcaacatgagcaggttctatttggttgtggcaaccttaagatttatgactgactgtcctatcaacacttggcaaatgtttccatgctatggggatgcattttacaggctgttaaataagaacccacgaagtggtccggtatgtttttaaaaaatgagcctagcaccaatgtatagctttctctagaatttaaatctcattgttaatttgaagttcctctctttattgaaagctgggtattgaatacacctactgggagatgtggccacatagagatagtctggattaatgggctttggtcttattttttagacctaaatttattcttcattaaaagaagagtaaaattccaggtgcggtggctcacgcctgtaatcccggcactttgggagcctgaggcgggtggatcactcaagattaggagtttgagaacaactcctcagttggtcaacatgtcaaaacccctctctgctaagagtacaaagacttggccgggcgtggtggtgcgtgcctgtaatcccagctgctcgggaggctgaggcgggagaatcgcttgagcccgggaggcagaggttgcggtgagctgaaatcacaccactgcactccagcctgggcgacagagcgagacttcgtctcaaaaaaaaaaaaaaaaaaaaaaaaaaaaaaa

SEQ ID NO: 58174 - DNA, 1466 bp, Homo Sapiens
cgctgagtccgcagcgcggggcgaaagagcgggcttctcttgttttaattaaaatcttatcactgcagttgctcttcgaggcagcattggaaggatttctgcccctccaagcttcctttccagggcgaggccttcttgggcagctttgtggccagcgggatggggccctcggcctcgtcccatgggagcccagtgccactgccctctgacctgtccttccgctccccaacccctagcaacctgcccatggtgcagctgtgggccgcccacgcccatgaaggcttctcccacctgcccagtgggctgtacccatcctacctccacctgaaccacctggagccccccagcagtgggagccccctcctcagccagctgggtcagcccagcattttcgatacccagaaaggtcaggggccaggaggaggtaagactggagtgcggggttgggggtggcacaggggccttctgagaggcttctggggcctttggcagcatccaggtagcccccagctctgtccaggatgctggctttttttttttttttttttttttgagacagggtctcactatgttgcccaggctggagtgcagtggtgcgatcatgggtcactgcagcctcaaactcccaaatgatgcacctgactcagccccccaagtagctgggactgcagacacaccccaccacagccagctgactttttaacttttctgtagaggtggagtcttgctgtgttgcccaggatggtttcaaactcctggcctcaagcaatcctcctacctcggctttccaaagtgctgggattacagatgtgagccattgtggcctaagatgcttttttgagacctgagtccctaagaccccccacaggctccttgggcccacccacagccctgggtgccttctggtcacactgtcctcttaggggccctgctaggccttccgggcaactttgaaaacaaacccctggtctctccttttacagatgaggaaacaggcttgggaagggtagatttaaacttggttgtaggtatttccagagcctgcgctctctagggctgggacgcccatttcttcttgccctggggggtgccttgccttggtgtgaaacctcggggctccctgcaccgaaaccgtttaatttccaagaaaaaacactgggtcgagtgcggctcaagcctgtaatcccagcactttgggtggccgagacgggtggatcacctgaggtcaagagttcaagaccagcctgacgaacatggtgaaaccccacctgtattaaaaatacaataattagccgtgcgtggtggggtgcgcctgtaatcccagctactggagaggctgaggcaggagaatcgcttgaacccaggaggtggaggttgcagtgagccaaggttgcgccactgtactccagcctgggtgaggagagcgagactctttctggaaaaaaaaaaaaaaaaaaaaaaaaaaa

SEQ ID NO: 58175 - DNA, 1375 bp, Homo Sapiens
ccacgcgtccggtgagggaaggacacagttcttatagtcagttaaatagtattaaagaaacaaatttatctgtcagtcttgctgggtccccaagggcttggggcatggggaagaggaaaaagagaaggaagagggtgagaatgagatggaaagcaggaccatcacggaaggaattcacgagtgtagcctttttaggttacagaaagcagcatccaaagtcatgaggaggcaagactaggaggagctgaagcagctggggctccggggaccagcatgtggctcttttggtcacatgagctgggaaccaggggcataggaagcagcatccaggacccagaataatgaggctgatgaggattaggccaagcatctaggctgttactgaaaactttagtgaacatcactgcgttcctggctttgtgctggaagaaacagaaggaatcagacatggtcttcctcaaagttgaagcgattcctccaaaactgaccaggcatgtaaaaacggcaatgacagtggggcacggtcagtgttgtgaaggtggagtggacaacgcattgcaggagctcagaggcagaactcacccactgtgcaaaggtgcagatcagcgctcctaacccatggggaagctgagaaagcagccaactcctacaagccttgcccctcccacccagggctctgggctgtgcttcttctgagaggcagcatcctgaggaagggctgcatggaaaagttgcggtggataaaaatcacaggagttatccatccccaggggctgagtggaatgggaggatggtggacacatgaagtttactgaatggagatgaagaaagcaagtaagagcatgaagtccccaaaataagggaatccgagagagtaaggcaggagccagaacctctccaagctagcccagcccagggagaggaaagaggcaccatgtttctaaagacccatgaagtgtttctcaggcttaggtgaacattggaaccacctgtggagtttaagtaccgatgcctgagtccttcacagagcagggaattcattggtttggagccagcctgggtattgggattttaaaaagcttcccaggtgattctaaggcagttgagatttttaaaaattacttatttgaggcaggatgatatcaaatctttctcaggtggaaaggaagggaggtgtttagaggtagaggtggaagtgacgtgatcagatggaggtgtggagagctctttgggcactgcagagtggatggctgggaagggactgcattcctgcaagggacctcttggaagcccctctcaccagctatgcctgttctaccataagacatgttccccattgagcacctctgccattggttaaaaaaaaaaaaaaaaa

SEQ ID NO: 58176 - DNA, 1341 bp, Homo Sapiens; identical to SEQ ID NO: 26043

SEQ ID NO: 58177 - DNA, 1332 bp, Homo Sapiens
ttttgcggtttgggagggaggctgcgaggaggggcgcggtgcccgccgccgccaccgcagcaccgcacagcgtctctcctgggggtgcgacctacgccggggacccagcgctcgggcaccggaggccggcctcgcaccggtgcggaggccggctctcgcgagaaagcataaaggatgttattggcagaaagataaaaatttcagtgaagaagaaagtaaagttggaagttaagggagacaaagttgaaaacaaagtgctggtgcttacatcatgccgagccttccttgtaacagcgcgaatccccaccaagctcgagttaaccttcagctacttggagattcatggcgtcgtttgcagcaagtcagctcagatgattgtggaaactgagaagtgcagcatttccatgaagatggcgtcacccgaggacgtgagtgaggtgctggctcacataggcacctgcctgaggaagatatttcctggcctctctccagtgagaatcatgaaaaaagtctccatggagccatctgagcgcctggctagtctccaggcgctgtgggacagccagaccgtggctgagcagggcccctgtggtggattttctcagatgtatgcctgtgtttgtgactggcttggattttcatacagggaagaagtacaatgggatgtggatacaatttatcttacccaagacaccagggaattgaatttacaagattttagtcatcttgaccacaggaaatccagaattgcagtgtggtccctgaagagctctagccaactgaatcggccagggaaaaagtatactagctggatatacctcctctttgcacagcctgggactacggaagatggtgaagcaggctcagctgtgtctgtagttgtggctgatgggcctaaagcctccagttctcaggcaattttttttttttcctgcttagagcagttctccttcttcctataagtgaggcaactttatactttcaaatttagacaagatgtttcctgtgtagctcataaaaaagtgaactgagaaagaaaaagggaaaatattttactttgtaagtattttccaataaaacaagaaaattgcacgtggaataagatagaagtttacagtcctccagtgtttggtctcagcgtttttggtccctttacaatcttaaaaatgatcgatctttggtttttgtgggtcaaaacattggtatttacaatattataaattaaaactaaaatttgaaatatttattaattaaaaagtgacactaataaagcaaaccattacgtactaaaaaaaaaaaaaaaaaaaaaaaaaaaaaaaaaaaaaaaaaaaa

SEQ ID NO: 58178 - DNA, 1318 bp, Homo Sapiens
atttttttaatggaattctgctctagcaacttttatttgctaactcgaaactgctgggatattattcataaatttttttaaaagtcactttggaatccatcatctcaatgataatttctttgtatactttattagaggttacttttttttttttttgagattgagtcttgctcttttgccaggctggagtgtagtggcgcgatctcggctcactgcagcctctacctcccaggttcaagcgattcccctggctcagcctcccgagtagctgggactataggcgcctgccaccatgcccggctaattttttgtattttagtagagatggggtttccccattttggccaggatgatctcaatctcctgaccttgatcccctcacctctaattaaaagaatttggaatatggttgtttagaatatgcttattatgttttccaaatagcttgtttactttttttactttgatttaggtatgtaaagattggtctcagtgaaatataaactttacatgagagtataatatcctactatctgtagataaataagtaattttttttttgagaattatttaacatgaatgtttttaaaaagaaaatagaaatttaatttattaagattaaatgttttcttattataattactgtaattgaaaacagattattgtttcattgaaagagttctaaaagtaagtagcagaagcagctttcttttaagaaatagacactgtaaaatgtacatattttaaagtttaacatactaatattttttagatttcagaaaacttttattttgaccttaattctgagcagatgaaagggttgttacgtccacatgtaccacctgctgccattactaccctggcaagatcagcaattttttctatcacttatccttcccaagatgtttttcttgtaataaaggtaagaataatgttaaatatatttgtttattttgtagtgtctgtatacttgtctgtcagtattataaacttttcaagggcaaagatttgacctttacatatttttttcatcttgatattctttaacacaatattggacatacacagtaggtgctacctaatttttcttgaactctttattagaattctccaatgaaacagaactaataggaattatatatatatcttagatctgttttgattattgtagtttataaatacattttcatatcaggaagtatgagactttcaactttcttcttttttccctaaatttgttttgattattcagggtctcttgaatttccctatgaattctaggatgggtttttctatttctgcaaaaaaaaaaaaaaaa

SEQ ID NO: 58179 - DNA, 1304 bp, Homo Sapiens
acggagtcttgctctgtcacccaggctggagcgcagtggcacagtcttggctcactgcaatctccgcctcccgggttcatgccgttctcctgcctcggcctcctcagtggctgggattgcgggtgcccgccaccacgcccggctgatttttttgtattttttagtggagacagggtttcaccgtgttggccaggatggtctcgatctcctgaccctgtgatctgcctgcctcggcctcccaaagtgctgggattacaggcgtgagtcaccacgcctggccaattatttgtatttttggtagagatggggtttcactatgttggccgggctggtcttgaactcctgacctggtgatccacctgcctcggcctcccaacgtgctgggattacaggtgtgagccactgcgcctggcgtagacaacccaatttttaacaaaagcaaagatttttaacaggcacattccagaagagggcatgctgacagttaacaggcacatgggaaaagtggtcaaacatgagtagccatcaggaaaatcaacgacgtcctactacactaaaatggaagaaacattgccagacgtggccatttgcaaatgtcgtttcctggtctgtgtcttttgattctcctgacagcatatttgagttaattttttaatgtgtaaggtatgagtggaggtcctcattaaaaattgtttaggctggctgtatggctcatgcctgtaatcacagcactttgagaggctgaagtgggaggatcatttgagcccaggagtttgagaccggctgggctaacatggcgagaccccatctctacaaaaaataagaaaattagctgggtgtggcaccacgcatctgtggtctcagttgtacaggaggctgaggccagaggatcacttgagcccgggagattgaggctgcagtgagccatgattgcagtaagatgtgatcacatccagttacatttgattttcagttaaacaacagaagtttagtggaggctgggggcagtggctcacggctgtgatcccagcactttgggaggctgaggcgggtggatcacctgaggtcaggagttcgagaccagcctggccggtatgatggaaccgtgtctctactaaaaatgcagggaaattggccgggcgtggtggcgggcgcctgtggtcccagctgctcagagggctgaggcaggagaatcgcttgagcccgggagacggaggttgcagtgagccaagattgtgctgctgcgctccagcctgggtgataagagtgaaactccatctcaaaaaaaaaaaaaaaaaaaaaaa

SEQ ID NO: 58180 - DNA, 1300 bp, Homo Sapiens
gatgaaccaacctctgctagcttcaagcttttcttctctcacctctttcagccatcaaataattgaaaagagttagggcttgctctggattaggatttggcttaaagggatgttgtggctgctttgatcatctattcagaccactaaaactttcttcagatcagcaataaggtaattttgctttcttatttgtgtgtacactggagtagcacttctaatttccttcaagaactcttcctttgcattcacatcttggctagctttcagcctagctcaacttttgtcatgccttcctcactaagctttatttttagcttttgatttaaagtgaaaaacctgtgactcttcttttcacctgaacacttagaggctattgtagggttattaattgttctgatttcattattgtcgtgtgtcagggaatagggacacccaaggagagggagagtgactggagaacagatggtcagtggagcagtcagaacatatgcagcatgtatcgattaagttcactatcttacctaggtgtggtatgtggcactccaatgacaatggtagtatcaaagatcatagatcactaacatatacaacaataataaacaagttgggagaattaccaaaatatgacacagagacacaacgagatgagcacaagctattggaaaaatggcattttagactttttttgacatagggttgctgcaaaccttgaatgtgttttaaaaaattgtttttaaaccagtcaaatttagcagtggggggttgtataccaactttaatgacactatgttagtaacttctgattacccactaccatttgaccagccaaaaaaaaaaaaaaatgttttttaatgcagtatctttgaaggtcagtaaagcaaagcacaataaaatgaggtatgcctatagttactttgtagagtccataggactttctatgtagaaagtcctgtcttttgcagataggccgttttactttcttttttttcccaatcttttctttcttgtgcattattacatttactcatacctccaggacaatgttgaagagaaatgatgtattagtccattttcacactgctataaagaactgcctgtattagcctagcatggtggcggacacctgtaatcccagctatgcaagaggctgagacgagaatctcttgaacctgggaggcggaggttgcaacgagctgagatcgcgccactgcactccagcctgggtgacagagtgagacactgtctcaaaaaaaaaaaaaaaaaaaaaaaaaaaaaaaaaaaaaaaaaaaaaaaaaaaaaa

SEQ ID NO: 58181 - DNA, 1079 bp, Homo Sapiens
gtgagcagagattgcgctactgcactccagcctgtgtggcagagccagaccctgtctcaaaaaaaaaggccttgggctgggcgaagtggctcactcacacctgtaatcccagcattttgggaggttgaggtgggcggatcacgaggtcaggagatcaagaccatcctggctaacatggtgaaaccccgtctctactaaaaatacaaaaaaaaattagctggtgtggtgacacgcacctgtagtcccaactactcagaaggctgaggcaggagaatcacttgaacccgggaggcggaggttgcagtgagccaagatcgcgtcattgcactccggcctggcgacagggagaataaaaaaaaaaaaaaccctttatggggtgacaggacaggactaagcctcagtgagccaggctggggaggtcatcatcggcccaatctttcttttcaaaaaggtcaaattgacttacttatctagggagaaatggggccctcctgcctaggtgagaaactagagctgggcttcttcaccagataaaccgtcttggtacggtgatgcctggagactggtagaggcaaccatgggctccagcagcataaatgctttcaggcaacaggctgaaacacctttccagaatcccagctacacacctgaccgagcacagtggctgatgcctataatcccagcactttgggagcctgagttggagatgaccctgggcaacaaagggagccaccccgtatctacaaaaaaatataaggagccgggcacagtggctcacacctgtaatcgcaacactttgggaggctaaggagggcggattacctgaggtcaggagttcaacaccagcctggccaacatggtgaaacaaaagtctactaaaaatacaaaaattagctgggcgtggtggcaggtgcctataatcacacctacttgggaggctgagacaggagtattgcttgaacctgggaggtagagtctgcagtgagctgagatcgcaccactgcactccagcctgggcaacaatgagcaaaactccatctcaaaaaaaaaaaaaaaaaaaaaaaaaaaaaaaaaaaaaa

SEQ ID NO: 58182 - DNA, 1040 bp, Homo Sapiens
catagatttttgaaagtcaagtgagaaaaattcagtcaatacttccaacatttaagaaagtgtaagtcctttttgatttattgttttatttctaaaagtaataaatatcaatagaaggaaattaatccattactgttttgaggctgcatggtgctatttttctgacatttggcttaatttggatacctctttctgcttccaggtaccattcattgtattttccatgcaactgggcatccttgccatgttcttgatcttagaagaaagtctttaagtgtttcaccattgagtatgatatttgctgtggggttttcatatgtggcttttattatggtgaggtattttccttgtatttctagctcgttgagtgttttcattctgaaaggatgttgaattctgtcagatgctttttctgcatcaattgagatgatcatgtgttttttcgcccttcattctgttcatgtggtgtattgcatttaccagtttttatgtgttcaaccatccttgcattccaggaataaatcccacctggtcatggtgtataatccttttaatatgctgctgaattcaatttcctagttttttattgaggattgttacatcactgttcataagggatatgatattggtctgtagctttgggtttttatagtgtctttggctttagtgtcagggagtgctggcctcatagaatgagatggtagtggaggaggtattggttaagagatttaggccgggtgcagtggcttgtgcctgtaatcctagtactttgggaggctgaggtgggaggatcgcctgagcccaggagttcaagaccagtttaggcaacatagtggaaccctgtgtctacaaaaaataaaaaaatttagctgggcattttggcatatgcctatagtcccagctacttgggaggctgaggagggaggatcacttgagcccaggaggtcaagtttgcagtgaactacgattgcaccattgcattccagtctgggcgacaaagtgagatcctgtctcaaaaaaaaaaaaaaaaaaaaaaaaaa

SEQ ID NO: 58183 - DNA, 989 bp, Homo Sapiens
ttcggcacgagggtgatttgacctatagaattttccaaattcaaaatgtagaaaattaacctggcatgctggctgacgcttataatcctagcactttgggaggttgaagtgatcctacaacttcagcccctcaagtaactgggacagcaggtgtgtgccaccacatccagctaatttttttttgttgttgtattttttatatagacagggtttcgccatgttgccaaggctggtctcaactcctgagctcaaataatccgcctaccttggcctgccaaagtgctgggatttcaggcatgagccactgctcctggatgcatgcaactcttttttttttttgtttttttggagacagagtttcgcttttattgcccaggctggagtgcaatggctcgatctcggttcactgcaaccttcacctccttggttcaagtgattctcctgcctcagcctctcaagtagctgggattacaggcatgtgccaccacgcccagctaattttgtattttcagtagagactgggtttctccatgttggtcaggctggtctagaactcctgacctcaggggatctgcctgccttggcctcccaaagtgctgggattacaggtgtgagccactgcgcctggcctgcatgcaactcttaaaaacaaacaaaccagaggggaggggggtggggggagggatagcattaggagatatacctaatgctacgtgacaagttaatgggtgcagcacacccaacatggcgcaggtacacatatgtaacaaacctgcatgttgtgcacatgtaccctaaaacttaaagtaaaataacaataaaatgaaaaaaaaaagaaaaaaaagaaatatttatgaatgtaaatgtttattgtccatttttaactaataagcaagcttactaaaaactgcacttcacacttagcttaatgtttgagggaattaacttcataaataaaaactagaaaattaaaaaaaaaaaaaaaaaaa

SEQ ID NO: 58184 - DNA, 921 bp, Homo Sapiens
agcactcggtcccagccgataaatctggggcagcgcgcggtaggagctgcgggcggccaggccccttcctgcgtccgcacctggccccgcgcgcccctctcgggcgtccggcttccggcgtcctggcggctcgggtggcggcggttcgggcggccgcctggctgctcctcggggcggcgaccgggctcacgcgcgggcccgccgcggccttcaccgccgcgcgctctgacgccggcataagggccatgtgttctgaaattattttgaggcaagaagttttgaaagatggtttccacagagaccttttaatcaaagtgaagtttggggaaagcattgaggacttgcacacctgccgtctcttaattaaacaggacattcctgcaggactttatgtggatccgtatgagttggcttcattacgagagagaaacataacagaggcagtgatggtttcagaaaattttgatatagaggcccctaactatttgtccaaggagtctgaagttctcatttatgccagacgagattcacagtgcattgactgttttcaagcctttttgcctgtgcactgccgctatcatcggccgcacagtgaagatggagaagcctcgattgtggtcaataacccagatttgttgatgttttgtgaccaagctggctccagaagaatgatcagattccggtttgattcctttgacaaaactatagagttcccgattttgaaatgctgggctcactcagaagtggcagccccttgtgctttggagaatgaggatatctgccaatggaacaagatgaagtataaatcagtatataagaatgtgattctacaagttccagtgggactgactgtacatacctctctagtatgttctgtgactctgctcattacaatcctgtgctctaaaaaaaaaaaaaaaa

SEQ ID NO: 58185 - DNA, 903 bp, Homo Sapiens
tttttttttttttttttttaatttagtaaaaaattacttgcactttaggttttaaaaagtttaacacatttaagatttagagtagctaagagtaatgtccattcatttatcctaagtaccaaataatacgttaattcctttgtccctgactggatcttccaaattctgtctagttctaaaatattgggcttaatatttttatgaagccacaggttatagtgacctcgtgtgctcttcctttctaaggattcagtataatctctgagtcttttgccatcaaattttgaaagttttatgaagtcactttcttgttcctgttgcctagttgtcctggttgttaggagcatgttgacttttgagattaacacctcttatacagaaattaatttcctgaaaaggaagatttattgattcaaaatcattgatttctttagtttttgtttctttttataactggcacatcgtaagtgcttagtgctatatttttatttctaaaaatccaatctgctgtaacatttccccataattttgactccgaattacaaagtattaagatagattatattgtagttcctggctatgtgataatagttactcatttgtatcttttaatgtgtcagtgaagtattaattattgacttaagaagttgagtagaaagatgagagcataacctttggcacttcaaattaccccctagtttgaagtcaggttatgagccaataaatgtttgtatggcactttgtagccataagtgctattgaaaggtaaaataattggagtggctcagaaagctgttttccctgaggccctgagaaaaatctcactaagatatgcttggcttcaaaagatgactcaactatgaattattaaagtaatctttgtttaaaaaaaaaaaaaaaaaa

SEQ ID NO: 58186 - DNA, 789 bp, Homo Sapiens
aaggaaaagaggaaaagtagattgattgggatagcaggtagaaaagaattccaagggcttttagtaagaactatatacaatgaagactcctaaacttgagcttaatatatgccaagtactattctggacattgaagatacaagtaatcataatgtcatattcttaccttcaagtatctcagggtctactggagaagataaacagattaacatacattataacaaagaaagtgttaaaatagtagtatgaacatagatatttaaaagaaggagtatctaacttttttcttggagcacaggcaaagcttcatagaggaagtggcatttaagatgagccttactgatcagtagtagcttgggaagagagaaaagggaaagggaatttttagcaagagatatggcttgtgcaaaggcttaaaacggtggaaaagcatggtatatttgaggattcatgagcagttcaatttgactgagttatagggtgaatgaaagggagtagcaggagatgaagctggaaagatttcctaacactaggtggtaaaaggaacttctctaacctggtaagaagtttggattttattctgtaggcaaaaaaataactcaagctgagtagaatattataaaatttttgtttaaaaaagaaaacttggccaggtgcggtggctcacacctgtaatcccagcactttgggaggctgaggcaggtggatcacccaaggtcaggagttcaaaacaagactggccaacatggttaaatcccctctctacaaaaacaaaaaaaaaaaaaaaaa

SEQ ID NO: 58187 - DNA, 502 bp, Homo Sapiens
ctagacatcaagcataatcggccgcgcagagactgcggtgagggaaagggtctgctaggtggtgagaatagggagtcagggaggagagggctgaaaggactattctgccctagacgtgggagtagggttgagggatggaaccaaggagaagggggctgttaggctggaagcagtaacgaggaagaataatgaagagagggcttgctgggagtcctcagactcctctcctaacccaccccttcctttccagtggcagagggcaaagtgtgtgacccactgtgctcctctgggggatgctggggcccaggccctggtcagtgcttgtcctgtcgaaattatagccgaggaggtgtctgtgtgacccactgcaactttctgaatgggtacagtaaggggagccagtcaaggatgggtgggggtggggccctgcaatggaactgttcaggtggcatacaataaaagtctttagacagcaaaaaaaaaaaaaaaaaaaaaaaaaaaa

SEQ ID NO: 58188 - DNA, 586 bp, Homo Sapiens
aaatgactaaatatttttatgtttctgtcagtatatggaatttttcttaaaggcggtcaataaataaaattctgtttatttaaaagaaaaaaagaaacagatccagacctatttagaattaaacggccatgatatctgcagtttattatctgtggttcagcaatataataatatcagtagccacagtgaccacaactatatatatatatatatagttcatgaatctggcatgttttctataagtctgaaagaatttcaaaaaaaaaatgttgaggcagagcagctacctgaggtagccaccaaacctacgtgcagagatcagaagaacacaaatacagtaaacgtgctgagggccaggggcagctgttcagagttgctgttctctgctgtctgctttggtgttccagaagggtgtggccccagtattagcttggcatggtggcgtacacctgtagtcccagctgctccaagaggctgaggcaggaagatagtttgagcccatgagttcaaggctgtagtgaagtatgatcctgcactccactccagcctgggcaacatagtgagaccctgtctcttaaaaaaaaaa

SEQ ID NO: 58189 - DNA, 444 bp, Homo Sapiens
ccgggtcgactactactactaaattcgcggccgcgtcgacagaacaaccttttctacccacttttgtttcttctggtgatacctatttacattttgctttcaaagggtgcccaaccactggatgccatacttgtgttattagctatctctatctgcctaagcctctggtttgcttcctcttgggaattaaaaataagatttctcttgatttcattgaaaaatcatcattctttcagctttgaccatattgttttgataaaaacagctgatttgtattattgaacatctttctcatttttctctctccataaggagaaattcatcacgatttattacctgaacatttgtgaaaccaatttgagagaatcccaaaagaatcattttaattgaagccacctaattacttgtaattaagaagacttaaaatgccaaaaaaaaaaaaaa

SEQ ID NO: 58190 - DNA, 313 bp, Homo Sapiens
ggttgaatacagtgtacataacattgaagaatgtttccaattctaaaatttggaaggatggtgtttaaaggcactgtcgttagttatctcaacaggtggtagctggtaattgataattatatttaaagtatgtgtattcattgtggttggtagtaatacagcatttttatctgcagatctcaaagcatgtgtgaataaatatgcattatttccctattttaagtagccagagactcactgaacgttaattagatataagcagacagagaaatttcatgtccgctgcttgcttgatgctactaaaaaaaaaaaa

SEQ ID NO: 58191 - DNA, 7940 bp, Homo Sapiens
gggatgagggaagggcggccgtggccctgggggcggcgggagctgctttgcctccaccgatctccctgtggggccctcatgtgctgtgctcgctgacacccgaagtccgcggctttccgcacacggtggggtcgtcagacccgctgcccttggcggtcgaagtcgtcgtgcgggcccgcggcggccgcccatggagaaggccaggagaggcggggatggcgtcccccgggggcccgtactgcacatcgtggtggtcggatttcaccacaagaagggctgccaggagggagcacacgagcgaatgaggtgggaactggagtgcacgagcactggagctgactggctgcttcagagctgatgggatcaaactccactcagatccactgcattccacccctcgtggagggagtgcacaggtgagtgggtacaggagccaaagcgagcgcttttggacaccggcaggagcaaactctgtgcaggccctgcagcaacatctaggtgggggtgcttgtgacccccaaagccccagagagtgtgttacagtgttcatttcgctcttccatctgcaaacagcttaagtgttaacagatcagtgggccctctgcctttttgcatgaggcaggtgtcctccaccagggcagtgtgaccgccttttgtatccacactcgtggctcccaagctcttgtccagcgtccaggaaaaatgaggtcgcttgaacgaattgaagggtggtaaatgcaggggattttattgccaatgaaagtggctctcagtggaaaggggagctgaaaaagagatggggcaggtaggtaagcttcccctgaagtccagccatctccaaccagattcttttccaaagttaggccatcaagctgtccctctgaagtcaagccacttctctccagtgtccagccgtagtccctgacatctagctgcgtctctctgccagctgagtcaggggtttttataggcacaggatgggggctgggcaggccatggatagtttaatgaaaggcaatattctagtggaaaaacaagttctcactttgggccacgggtttcaggcttttccacttcaaggtggtgttttattggggacccacccttttctgcctagaatatctctacctccatccctatcaatatatgttgacacaagcaaaatgtcattttatataatagagtcctgatattctgtttcactgtggtgggattctcataataacaatttctacgttaaaattaaaatacacattatctattttcatgctcataatccaagtactccaatttaaggaatgtgaaataatagctctttaattctagggaaaaaatagaagataacagcctttattcacttgaatgtataaaagtacatgctttaaactaagatacttatttccatttaatttaaaaacaaacttcttgatgggctcagtgacacatgcttgtaatcccagccctttgggagaccagggtgggaagattgcttgatcctaggtgtttgagagcagcctgggcaacgaaaaatgaaataattaactgggtgcagtggtgcacgcctgtagtcccagctactcaggctgaagtggaaggaccacttgagcacaggaggccgaggctgcagtgagccctgatcacaccagtgcacagcagcttgagtgacagagcaagaccctgtctcttaaaaacagaacaaggccaggcacggtggcctataatcccagcactttgggaggctgaggcgggtggatcacttgaggtcaggagttcaagaccggcctggccaacatggtgaaaccccgtctctactgaaaatacaagaattggccggctgtggtggcaggtgcctgtggtccaggctgctcgggaggctgaggcaggagaatcgcctgaatccaggaggtggaagtttctgtgagccaagagcatgccactgcactccagactgggcgacagagccagactgtgtctcaagaaaaataaaaaataaaaaatcttacttttaattggtaagtctcaaaagtaccattttacctctgcagtatacactttatatttctgaacatctaatgcagtcatgaaaatgttgtcatattgaggtataggagtgtaaagcgcagctgtttcaaatctatacttgacaaatacagtgatttgttgccaactttgtagtcgagtgaggaataaatgccaattgctttgtagtattgacttttcaagagatatgagaaagaaaccataactgagaagaaaacatgtctgatgcccagggctttttcgttttcttttgttttaagcagaaaacatgacagagctttgactttgctgcctaaaatattatgactattaagaaaataaatactttgtgcttctgagtgaaaagaaaaaatctctgagataccgagaaaggaagcaaagaggcagagcagttgtgaagcactctccttccttctgtaagccgttgatatacgtagggtccatggatgtggttaatgtgtgtgctaatagtttggcagtgtggcttctatttgccgtatggttctctggcagtggaacatagtgcattgttaaaaagtgaacagagggtattcctgaagtactcagagttcacactagggtactatgttactttgtttttgtagttttcttgttttctcagtctttttttctgaggacaaagtaaatggaatctgactagaggacaccaatttggtttataaactatgacaaagcatggtaatttttattactggaggacaaacatgtcaccctttcttgcatagttcatttagcatttagaaaaattgcttttttattccttgtgatcagagtcagcttttactttttagaaatcagctattgtcttatttttccctcctcttctcccttagtaatcttgtaaatctaaaaattagaatcaaaatagatttggccacatgaatattggttacatacaaagtcatatttgaaatttgtgtgatttagtagcagcctttctggggatatttgatacattttttatgcattgtatgtattaatgccctaccagacatctttttttttttaagagaaaagcaaacagaagtttattaacatgattaccttgtgaatacatgggagataactcagaaatgagaaaatctcaagagtagatctcaaagaggtggcttcaacttcagacttacacacttcattccccaacacaaagaatgaagggtgtaggccagacaaccctcattctctgttaagactacctggtgaagaagtgcagggtaaacaaaagtgaggtttgttatgcagattgaacttgtgctttttgtgttgataagagtttccagtgatttaggcctttagtcccagcacttagggaggccaaggcaggtggatcacttcaggtcaggagttcgagaccagcctggccagcatggtgaaaacctcatctctactgaaaaaaatataaaaattagccaggtgtggtggcaggcaccagtagtcccagctgctcggggggctgaggcaggagaatcgcttgaaactggaaggtggaggttgcagtgagccgagatcacatcaatgcactccagcctgggcaacagagccagatcctgtctcaaacaaataaatgaaagtttccagtgatttagtcatccttctcttcctggtacagaaaggaagacactcttacaaatgtagatattctttataaaataaatttctcttacaaaaatacaacttttactgttttcagagcttctcctgtgtctgtttcccaaaataatcagtttaaagtaatcctgtgccaaagaggcatatttggaatggcatatactggtgtcctacagacatattttggggtgtcatgtcctgaactctacagttggctccctccgccttatggaaatgtaaataaaatctttggagaccattggtttccactgagctccttcatcagctccaacagaccaaaccaagttagaggtccctcctgctaaagttcgacgtcaccaatctaagttatctgacctgagaaatcaggagaaagagaaacaaaagtcaaatccccaaacaggctagttttagctggcatgataagggagtctcctctgctttaacccttaaaaggaaagtaactttgaaactactgatttactttttgttccttatttctgctttcttcagccttttacccatcccaaaatactcactacccacattgcagagatgagctctctcaacttcttgttctgaaggttacgtgactggtgaattgttctttgctcaaataaactgttaaatttatcttggcagactctattttgatccccaaatttgatttagatttggggccattaaatttcactatttaataataaccctactggatgagaataagtgtttctcaatttctggtgatatggtttggctgtgtccccacccagaatctcatcttgaattatattccccataatccccacgtgtcaatggcaggaccaggtagaggtaattggatcatgggggcagtttcccccatgcatttctcttgatagtgaatgaatctcatgagatctgatggttttataaatatctggcatttcccctgcttgcactcactccattccactgccctgtgaagcaggtgcctgcttctcctttgccttccgccatgattataagtttcctgaggtttcctccctagcattacagaactgtgagttaattaaacctttcctttataaattacccagtctcaggtgttttttcatagcagtatgaggactgatatatctgggtacttaacattggttttcgtctgtggtttttttacatatacttagggctgccatgtacagctatatatgtacttcacgacacaattgcagggagagccattcatgtaaatgacaatgtctgtggttctccctggagctgtgcagtgaggcagcctactacacttatcatcacttctgtggtgctggttagtttaattggcattactatttaaattgtcttgattcaactgagtatttaagagtctcatgttaacttccaagagaattcctctttagcctctgtgccatgaaattttgtgtctgtgtggattaatttggatatatagaaaggggacagatattcagtcagtatttaaaacatgaaaaacatacaatttaagatttaaatataccatcaatttggaaataacattctttttttttcatgcttaatctctgataattagggattatcagatagcaactgggcattctacaattcagtcatattgtgacattactcagttaacatcaaactctgtaagggctcactcagtcccacaaaactgccctcacttcaggcaccaatcacaagtcctgggtccccaggccaccccacctctgtctgactttgctaccaattcagggcttcccataaccttctctgaggtttgataatttgccagaatgactcataaaactcaggaaaactcttcgcttgcattcactggtttattattaaaggacacaattcaggaacaaccagatggaagagatgaataaggcaaggtgttggttggtgggtcagggagtttccatgccatctttagcatgctgccctcccagcactttgatgtgttcaacaacccaggaactcactgaatcccattgtttaggggtttttatggaggtttcattacataggcgtgattgactaaaccattggccattggtgatagaattcaatctccaacaccgttcctgggaggtcaaggggtatggctgaaagttccatccctttaatcaaggcttggtctttccggtgatcagcctctgtcatgaagctatctaggtcctcctaccactagagtcaccttagcataaactcaagtatgattgattggggcttattatgaataacaaaagatgctcctattactcaggaaattccaaggatgttaggagttttgttccaggaatgagggacaaggaccaaatatatgtatttttaattatatcacatttgaatattctgaaaagtttgcagtagtataatgttttaaaaaaactagaaaaactcaacaatagaggattgatattaaaataatgaaataatatatatccattagaaaggagtttttttttttttttttttttttggacggagtctctctgttgcccaggctggggtgcggtggcgccgtctcggctcactgcaaccaccgccacctgggttcgggtggttctcctgcctcagcctcctgagtggttgggactgcgggcgcctgccaccacacccggctaatattttttgtattgtcggtggagacggggtttcaccatgttggccaggatggtcttgatctcctgacctcgtgatctgcctgcctcggtcccccaaagtgctggaattgcgggtgtgagccactgcacccggccagaaaggagttttaataaacagttttgaacttgattagcaatttcagcagtttccaaatggaagtattcgttggtagaaaatctaccagcaggagaagagaattatagaaagctgccaacacagtacaggcagtctgcaatttatgaaagagttgtgttctaaaagttggctgtttgaaattctgaacactttcccaaagaaacaatgttgtaaatactctgggcccaagtcaggctagaacagccttaattttacccatggaattcttggaatacatgtagtatccacacttctatttatgacagttttgagtcaactgcgtcttcagtttcagctagaaccatctaaaactgatcttccttcagtagagttgcgaattcggagaatatgttaagcatagcatagcttcagatattaattaaacttctggccaatggcaacctgttaactaaatcttcagaacagaagatagatttctacacctgcccttaactccaagattataggatggaaataagatttccttcagaagttaagaactgcttgtgattgtcttatttatttatttatttttaatcctaaaagcaatacatatccatttaaaaataattaaaagtagaggtagtatgctccacttgctgtgaaatcatttagaaaattgtttttgtgtacacatacaacacagctagaacaagtgtggctaaaaaaagcaatgcagttggtaaataaagatgaagtttgttaggttgttcatattcttttaactttctgtatgtttgaaaatttcaaaacaaaatggtggcgattttttttttaaagtaacaggagtattcgcttatcttccatccccaacctcattctcctctccagagttaaaacctctgctagcagtgtatatagattttcaagtgtcttttcaagcatgttttttaaatccatttacagaaaattttttttgcacaaacggaatcacagtatatacagaatcatactacagtcaccagtcaagggattttgtccaagaccccaagagcaggttcttggctctcatgcagggaagaattcagggcaagtcacagagtagagtgaagttaaaatgatttactacagactactgaattacagaatagggcatcctcagagagcaagaggagggtgcacccatttcaatataatgctaatatgggttattaagaaaagtgtactttggccaggcgcagtggctcacgcctataatcccggcactttgggaggtcaaggcgggcggatcacctaaagtcgggagtttgagactagcctgaccagcatggagaaaccccgtctctcctggaaatacaaaattagccgggcgtggtggtgcatgcctatagtcccagctacttgggcggctgaggcagcagaaacgcttggacccgagaggcggagattgcggtgagccgagattgtgccattgcactgcagcctgggcaacgagcgaaactccgtctcgaaaaaaaaaaaaaaaaaaa

SEQ ID NO: 58192 - DNA, 7033 bp, Homo Sapiens
atttgaatactagtttctgtgatcatgttataaattgttatggcaaaggactgcttcttggatcaatcaaaacctacctcttttctattctaataggattgtagacttagttttccaaggtagtaattattttgataatcaagagaccagatcaagtgaccagatctctccaataggagagatttctattttagttttttttttttttggtcttcccaagaaacatgcatatttcatgccatcatcaaaatgattccctagcataactacaaaagcagtaaatctgatggctggaatttcaagcgggataggaggagaggaccttgccttagcaggctggtgaaagagatattttgggagaggtggggcttcgggatgcttctcaaattgcaatgtgttggcagccgagaactttgcctctgcataggcccaactctacttgctgctttctgccagaacagccatctcttagttctgaaggacgtggccacccacttggttattttgctgctgttagtctgcagtaaatggttactggcccagacataggaccatgtgtaaaagtggagaaagtacacccaaggctctatgggcaagctttcgtagcctcttagttttatggaaaagaaaacatgttgtgatattaacatgtgtggttaaaactacagcgttagagctcttccctggcatcagctgctcacataatgaaattaggtcaacaggagcagacctgttgaaatttatcagcctaaattatgttgaacaacgcctaccttctgccccacaagcaaacttatgaaagcttcctggtgctgcctgaagacctatatctgtgagctcacaggtgtctaacctcagcttccttcctatcctgatgggctgaataaatttcttgaccttaccttttaaaataaatcatctttaaataattgtggggcttaggctgacctttctcaagaggttgacttatagctattacccttgtaactgaattctgcaagtttgcctgtcttacccaagattagcctatgaggatttccacaggtccagtgctagctttgagcagtgccttctttcaagctttaattttgctttctggcagctgggttttttaaattttatttatttatttatttatttatttttgagacgaagtctcactctgttgcccgggctggagtgcagtggcatgatctctgctcactgcagcctgcgcctcctgggttcaagtgattctactgcctcagccttccaagtagctgggatcacaggcatgtgccaccacgcccagctaatttttgtatttttagtagaaacggggtttcactgtgttggccaggctggtctcgaactcctaatctcaagtgatccacccacctcggcctcccaaagtgctgggattacaggcgtgagccactgcgcctggccggaactgaatttttaattgtatttagttttaattaatttaagtgtaaaactaaaaataattttaaaaagaattgttgaaatgatagtattttggatatattggggtaaataaaaagtagtattagaattatcttcaccttttcctttttcctttttaaatgtggctactagaaaagttaaaataatatatgcagttcatattatatttctattggacagcactgttgtagaaagatatacaataagcagagaacagtgttcctctggggattgagatggaggagattgggaagaggaaagcctttggtcttttgttttataatgagtgtatgtaatcattattacttttaaaaatgtttgatggaaaatgtaaaaaggaagaaaggactgacaacatactacaatgaattttaaaaaggagcaacaaagggaccaagacaaaacacaaatcacttacgttactttaaaaggttgagtattttaaattactgttctctttttttcaaataaatgggcagtggaaaggaaagttgtcatttctataaaaaaaagaaagacatatgtgatttctgtggcgttcttatgtgactcccattattttccccaaaggcttctttttgctttagtttttttttttttgatttgatagggcatttttgtgcttcagatgattgatgttgaatctgaagtttaagttttggttcttgacaacttctttgcctctcagttttatggagcttaagagattgcagagacctcatggaacatcaaaaagcctatctctctcaagcaataaatgtttcctacttttaagaacttggaggaatatctaattttccctttcttcttaataacatttatatttgtttccccaaaaatgttttaaattttctttaatctatagtggttattaatatttcaaatgagaaaagaggagtcattagtttatcttcctgtatcagcctgtcatttgtgtcactgtctgtcactttcctgcctttgcaccaggttatggagacagaacggatgatttatctggtgacagaatatgctagtggaggggaaatatttggtaagtacatttattgcattctttaaacagctattgagcacactatggcaaacctaaaatagctgttcagtgcctttgtcacttgagcagcagtcacttgatgctgttcttcaatcctgccattttctatcaacaaaggcattttaatttgttttgattaatctagtaaaatccctttaacacatttgtttccttagcaaaggtgttttgtttatttcagtcaggcgctgacagttgagattaaagatctccaaaaacaagcatcctttctgaacgtgggacttagggtctttcctgtttgcaggttttaattgaggttaccaagtgcgacagaactcacacaagtgtgtgggcctctgttgtgtcagaaagagccacttagagcacataatctcacccgagtgcgttccttaaactttgtttaaatataacatgtaactatattatttaccatgtgttcacagttcccctcagtaattcttgtaattttgggggttctgccttcagtagctatattttcctctcacacttagctttagcacaatgtcagaaataagcaagagactttgttactgacaaatctgatttttaagatgctaaaaactgacaaaacgattttttttctaacagtgataaatggagccaagtagagttaaagggtaaacttccaaatctaaattgatgtgtcttttattttttcttttggcaactaactacagagaaaagtttctttatatactttatttgtctaatttcctcattttaaaaaaaatttatcaatatgaacacttgctagtttaaaattttttaatttttattttaaacatttgctccttcctgcacgataaaatgtatttaaaagcatagaatcacttttaaaatgaatcttcttattaatgactagtcagttgtggctgcatggatgtgtgtgtgtgtgtgtttgtgtttttaaagtttccctagcgatctagtgtttttttgtgtgtcaaagtatctttagggtaagtgctagtcctttttaaaagaggtatcattatttcttaattttatatttaattggctttgtatatgtgattagttaatgtcaaagctaatggtgatagaaatttatactcaatatagtatgggaggggatactttattttaaagaaatgaaagcattacaagatttgaaggatagcattgtttgtcaagaaggtatagtaggccttcactatgtatgataattatatgccaatcatgtgccttggagatgctgactcaattaagacactggttttcctttccgtggagaaatctggtggaaaacagacagggaaatcaacatattactttgaagatgagaatggaaactgtaaaactctgtatagtagagaacagtagtgcagatggcagtttggttaactcttggagatcagggaaatcttcctggagggcatggttatatggaaatttatgaaccagaaaatgaaagcacaagagagaatatttggagagagagaaatagcagtcatgttattgggagactatactatggtctgacattccaggcacatgttatgataaacctgccttaattaagatcacaaatgtatacaaaggcaaatagaaaactttcattatctagataaggttttttctttggacagggtattgctctgctgccctggctggagtgcagtggtgcaatcctagctcactgcagcctcggactcctgggctcaagtgatcctcctgcctcagccatctgagtagctgatactatagctgtgcactagcatacctggctaatttttaaatttttagtagagacgggggtctcactatattgttcaggctggaagatacctttttacaagttttattctataaaaagtcaaacatctcccaaatccttgagctgcctgttaggtattttatttcatagaacgacatttattggtggggaaacaatggtaatttggggagaaaaaagatcatgtcatcttaatgtttgtaataaaaaaagacccaaacacagggcacatcaatctaccttactctttaagaaagcagattttatttatttatttatttatttatttatttatttatttatttatttattcttttttgagctagggtcttggctctgttgaccaggtgaagtgcagtgacgggatcacggctcggtgcacccccagcttcctgggctcaagtgatcctcctgccttagcttcctgagtagctgggactgtaggtatacaccaccatgccaggctaatttttaaatttttgtggcgattaggtctcattatgttgcccaggctggttgtggactcctgggctgtagcgatcctcctgccttggcctcccaaagtgttgggattataggcatgagctactgcacccagcaggaagcagtattagagagatccgtttcttggtcctggacttcatgtgaatgtacctcaagggatgaacaaacagaataccacttctgataatgttattttaaaaacaaaatattttaggttggtgaaaaagtaattgtggcttttgtcattgaaagtaatggcaaagaccgcaattacttttgcaccaacctataattatatattgtaacacatattatgtaatatataacaatagaatttgaaatgttattattgatactattaagtaatattattataaaagatccagatgtggaagaaaatagtgtattacctaaagaaattattgagactgcacagggatagaactgtctcatgagctctgatttttaaaaatgtctgtgtaaaaaagatgaaaggggcttagtcaagaaaacctgggctttggatgtatttagacctaggtttgaatcagatctctgtcacctatttgcccttttacttagagcaaattactagatgattctggtgcacaggttccaggtctgtataaggtaagatctagaatatttgtattatagttgtgaagattaaatgagatcgcatatatagagctctagcacagtgcttccttacgccttcatgtgagagagagatcaacttctgccgtcaaggtgtgaggagctctgctgacctgccttgcttgctgaaacaagtgaaaactattaaagaaaacaaaacccagtcatttaaagtctctggaaatcgtcctaagagtaagcagaaaatgaaggaacattattcaagaacatctgtgcaaattcggtaagaaacaaagtctggtcagcaaggtggaaattcccgtccaggctactgcagccaagaacgcagggcttccttctgtcaaaagacaaaattgcaagtttagtttgatgatcccagttggctttatttgcgattctagaatcggacaacatttcatttcatagaataagtgttccagtaagttgagcagaagagtttggcttatggacagaagggcttaagaagtctgaacagtgtattggttacttttaaacagaacaatagaaaattaaccagttaacatcaggttacttcgggctaccttttttagtaaggattaaagcagagggaacttcatcattgtgccagttaaagattttagactgggctgtttgggaaattggctgttatctctttctcctgatttctcaggtcagataacaacctagttttcgctttggaactttagcatgagtgactccattttgatatttagtttggtctgttggtgcctagtgcagaagtttattcgaaaacaatggtctcctgtaatttttatttgtcacttctcctcaattctctccagcatctgaatagcagctttcttcccaggaggatttggacatcagcaattctcattctgccccgagctgcctattgctgagtcctggagaagtgcagttaagagatgggggccccttcttctactcagcccccacttgtggaacttgatcaggtatgccgagaatactaggacccagatcactcttgccttgggtattaagacagtggtttcactgtcttttgctgctaggagaggcaagctgagaggaccccaggctgctgtcctcccccgctctccatccaccaaactctcagttcctagagtgggagcgtcactcagagaagtttgctgttgtccccaaccccagctccagagccctaactgagatttttacctgtggagaaaaacaaaccataaaacagctcctaatttcttcccaaaggaactgacttcatttgcaacagggagtgaagaagttcaaacctgattgtactctcaagaacagtagagggaaaagaaaaaagaaaaagaacagtggaggttgtggtaaaggacatttgagaagagattcatgaaacaggccaaatggtaggtttgctagttcgcagggggagaaccaatgaattaatttagaaagagcttctctgggattagaatgaaaataaatcactggctgggtgcacacctgtaattctagctattcaggcaggaggatggctcgagcctaggagttggaggtcagcataggcaacatagggagaccctgtcttaaaaaaaaaaaaaaaaaaa

SEQ ID NO: 58193 - DNA, 6808 bp, Homo Sapiens
acatatacacatatatatagctatactatcttaactatgattttcaatgcatgcaaactattcattatgtgtatataccataacttcttaaagcagtggttattcaactatggttggtccaaaactagggatttgcaaggagaaactctagcatcaccaaggagaagacaagaagtcatgggtaggctgcagttaggactccagaatcctcactttaagcggagcagttgtacttttttcatcagttttaactatcaacttttagaacaaaggatttctgtgcttcatatttaaaagtttgaaaaatgctgatctaaaccatcctcttgttattggacatagtgttttccagggttttaaaacatcatagtatattacacagtaacatctttgtacacgtagcgtagtatgtatgtgtgtgagactatagactatttctttctaaaaaaaatcccaggaggatagagcattcattgaatgagtctgacatctatatgatgcttatggtatagctctgcattgctcactaagacaatggagatggtgtacaatgtcaccagggtataagaacaacttacttgatcacaacttttctagcattatattttgccattaaaggggagaggggtagcaaatgttcttacaaccctcagtgacgccaggtggtgggccggtagttctgatgagaagagcaaacctggatttgcctctgatggtgaccacaccatgtcagtgggtcacagtgggtcagtgccacatcaggatctttttttgaggctgtaagtctgggtaaaacttagttaacaaggcccgaaagcccaaaattgaaaccttctggaaggctaggagttcagagcagttcagcttctgtttgtggtgatggtgagctgctgttcataatcagtagaaaaccttctttgaagtagcagtgataaccagaaaccctaatgagttacaaaggaatgtctgaatcattctcttttcttagtgatttctcaaagcttctgctaaatcagactcactgatcccagggaagacagaatgacatcctaataatgggcctagtgcatgcgaagtacacaaaataggcattttttttttgttattcccttaaatgccccctgtaatgaagagccgtgaagctggtaggactgtgaaggcaggcaaaatatctgatgaatcttccctttgatgagaaagaaagggaataaagctggcatgttttagttgcctaggtgccaggtaatttcacataaggtataataaaaaaaaaaaaatcagccattcctggccacctgttgtgttccaggagcatcagagagaaaactcccaggagacatgtcgagaggcaggaatgataggggcacacaaatgttcaacagtggctagaatttgttttaattgaaaagatggtagatttttattctaaagaatattttgaaataggaaaaaaattaagactatccactctagtgtaactattttcattttttttttaatgaaggcttttggggaatctttacaacctgtacatccacataggttctgttacctccatttgtaaagatgagcaaattaaggctcagaggccttcggtggcctaccctacccaaggccatgtagccagtaaataagtggtagattataaagttagaattcaggctccagtctgcctgaccctctgtgcacctcactgagtctttttctcctcatctagtgagaaaactacaacccagtgtgaccctgccttctctggtgtaaatggcttgactttgagcacatgactcagcagctttggcagccccctggctcagtaacatcccgtcccagctgctccttaaagggcattgcctacagtgaccatagtgacactcaagccaagtaacatagccctttgaatgtctctctcatggcttcttccagggatcttaaagccctgaacgaaggaagagacctagtgttcctgactcaatgtttatttattaagggcgtgctttatgtgcagtcttgagacaagggtagtagtgataatccagagttcatggttaagtgggaagggagagggagtgcagagcagacatgcttatggtgattggagtggagtgggcagggacatgggaccgggagagagctgatctgagctcagagctcagcagttgtcaggatcctcatgggaacctgggattagagaggtgccacattggaaatctggcaataatatgacccaagaaggagccccatgggacctggcaaagaactgagggggccaggcctggtggcacatccctgtagtcccagctactccacagaggccaaggcgggaggattgcttgagcctaggagttcgaggctgcagtgagctaggattgtaccactgcactccagcctgagcaacagagcaagaccctgcttcaaaaaaaaaaagaaagatttgagggggcccggagtgaggcctgtgatgaccacaggtgtcccctgaccctcaggcatggtataaagggacattgggtggatatattaggctgttcatgcatagccattaagaaaggcttgaggctgggtaatttataaataaaagaggtttaaactggccggcatctgcctggcttccagggaggcctcagggaccttttactcatggcaggaggcaaagtgggaacaggcacttcatatgacaaaagcaggagcaagagagagagtgggctgcaggaaggtgccatatacttttcaaccaccagatcacatgtgagagctcgagtgtacttatcaccaagggaatggcactaagccattcatgagggatccacccccacaatccaaatacctcccaccaggccccacctccaacaccggggattacatttcagcatgagatttgggcagggacaaatatccaaactctatcagtggggtactactacactttgaacatctgcttatattgcctagaacctggaagaagatgctgtaatttttcaatcttctttcatttcagctgttcatgccaagagcctggtggccatcttacacctgctcgttgctctgtctcagtatttccgcgcaccaattcgactcccagaccatgtttccatccaagtggttgtggtccaggtaagacaggtaacactacaaacatctgtgtctttaaagagtcgtggaggtcgagttcctatggtgcgtcgagtaggtcattagaaggatggctgcatgaatgttgagtgagcctgggtgtgcagtatattgggaggcactgaatgagctttctgttgcatgttggcttcccctggtaagtgtacacaagatggaagagcgtgtgcttgtgtatagatagctttgtgtggggtatgtgcctatggtttatgtgtttttgtctgagttttctgtgtaatgtgtagatgagggtgtgcggtatgtatgtgagctgtgtgtcatggggtcaggaggaaaggtatgtgggtgtgtgtgtgtgtgtgtgtgtgtgtgtgagtttgtgtacaggagtgtacaggtgccctgcaaaccatggagaaccataatattttggttaaacaaatgatacttaggtatggggagaacgatatctgtgcatataagggaatgtgtgtgtacatgtgcatgtgtttgagagagaccccaactggccatgtctgtagtgaaggtactgccactgttcacccactcacagaagcacagctgggatctcaagtcatcttttccagattgttggatggaatttccattcacatatggctgtgtaatttccacaatgagggtgtgctctctccctgtgactatctcactccgctcctaaccccattaaatacccaaattcaattttattttccaactttatacccatttagcaaaaggtcatccttttgtttgcttgttcctgttcttttccaaataaacatgcagcaaaggagagctctccatctaagcagctccctggcgatccaggctctggaatagggaatgataacagtggctctgccatcccttgataagaaaaagccttgagggctggtagactttgccctgtcagaccaggccagtttccaagacaaaaggactttgagttgaacttccaaggatcagctgtcaacaggaggagacaaggaaatggtcctcctaatcaactgatcagttgtcccccagtgaaaaactatttattccacacctctgggtacttaactccactaagcattaagaaggtataacaggaatatgacacctcggccctgcctgctgaggagataggactacaagtaagaagcagagagggctcataggaaaatgggaatgtgtgtggctcagataccgagtgccactggccaaaggtcctaaatgtcctcgttattgagctcttcacttgtctcaaacatggcactaagcattttatgtctgctatggatatgtggccaactcagactactctggttcaagcatcttcctagtgagtccaggacatctctgtcatgttatttttaccaatcaatgatgtgtgaatgcaattctttatgtttttaaaaactacaattagggaggcagagatgaataggtggacatcgtccccataggtgggagcacagaggatttttaggtacatgtcactatacatttgtcaaaatccatagaatggacagcaccaagagtgaaccctaatgtcagttatagactttgggtgatagtgacagtatcaattataagctcatcggttgttaaaagtgtatcattctggtgtaggatattgaaagtgggtgaggacaagtatgtgtcagggcagggaatatataggaaatctctggaaatgtctgtaccttcctctcaattttgctgtgaacctcagactgctctggaaaatatagtctgtttttttttaatcatggttcctgaaacagttcatgaaagagtactttaaaagtgaccacatatcactaacattgaaatttttaaaaattattttcataagtaaacatactgctgttatattcatttataatagctctcttatcactagaggagataaatacttttatgtaaattgcccttctttatcttctcttttgtgacaaatccagtccagttctttgtgcatgaatttgttgaacatcttaagacttttcttatcagctagaataaacagccctctaacagaaataataaaatctgcctgctggaattactacagactgaatgatgactgaaaatgtgagcaggagagagggggcttctattttgaaacagtggtcattgcaagcctgtgtctcctgccttattttgagctcaattataggccatcagaagcctgttgtcagtttaatttctcctgtaggctgttttgttagcatgagggagaaaagaggacatgttccataaaatggcattaatgcacatcaggttttatggggtgtttttgctttatcaagttgaacaggcacagaagcaagactcagaattggtggtgagtcacagactgaaccacagggagaactctttagggaacaaataatgggtggaggtgaatcaggatgctgtgtgaggggttattgaacccagatttcttttccattctatgcagaagcatttaattttgcagaaagttggagatgaggttttacgtctatgaatggccatgcaggacaaggacacagattccattaaccccacatgaaaacacagcctgtgttgaaactgcatgtggaaagaagtcctgatttatcttcacctggtcctctttaaatgatagattttttttttcttttacctccttttttgttttgattagtccattcttaatctaagccagatagactcttggtcttatccagttcttcctttcttctgtaaaagtattttgcaaggactctgggttctgtggaactttgggcaggaggctcgagaaggcagggctcagatgagccacccaagttcagaggctccttccttcttcacgctcatctcagccttggggaagatgcatttgcttggtcaatcgcttgctatgtcacagcatcctccaggtgtctggtgctggtggtggagggacgtagtagaatgaatctccctcctcacacccatcagaaagtcttcctgcaccccaacattacctccttcgtcagctcccatgcccacacagtgctttttaaaccctccaaactggcactcagagctgccccctgactgatggcagctgccctcccctggatggcctctggaacacatttgtgcgtcctgcctctgcctcttggctggggccattcctcccattgaaataaccccttctcagtgtccagctccagggccccctccccttggaaggtttctctgaccattctagctaaaagtgcttgctcctggcctgcgttcagcactttctgccgagggtgaccacgtaatctattattcataacacttttgagatgaaagggaatcttactaatatgctgggacatcagggataaaccaggactgttttggggaaaccattctcaggtgtctacttcttctatcccgattgactttagctcctcaagggcagaaactatatcatatactccatagtatttgttctaactccagcacagggccttgtacatagaaggcactgattaatgaaataaacaagaaagaggataagttgatgggagaagtgtggacagatggatggatggatggatggacggacggacggacgagtttctaacatgcttaaccttttctcagagaataagctagttacctgagtgaggacttactacttatttaaaagctcccatatttatcagtcaaaaaaaaaaaaaaaaaa

SEQ ID NO: 58194 - DNA, 6745 bp, Homo Sapiens
gtacaatccaagtctgtcgctgcccaggatagaggagggatgacgtgaattcacacgggcctctcctacaaatctgagtgtacatcaagtgaggggcgtccctccgcacctcactgttgggctgatcaatcccattcccactccattatgtgtgtatttctaagtggcagatttgccttaggaaatggaagaaggggatgaaatagtgaccaacacaaattactgggttggcgggagttgagagctggcaaaatcgtcttggagaaggaaatggtgcagatttcagagctggcagacagcatctacatccacctctgcaggaagcaagggaaacatttttcttctggagaatcgggcagcctgcagctgatccggtggtgtctgaaaccatcctgtgtgctgtagtgtcaacaacttagcctggttactttgccaccaaaccccaccaaatgcctttgtatctttttcagaactgcatctctgcagcataattgatattacaggaatgaaaagtgttctgaggcatattattcccagggtaaagagtcaccgctgattaattacctcaaggacaaggggacggtgactttttctcttgtatccagcagcgccacgcggggcgggcgggagaggcaaggctaagaggtggatgaaaggctagggttaaggcatttcacaatgtcaggcatcttgttagactgcggctttccaggccttcccccgtgactgctgcgggggcctaggccaaagatatgcccgagtagaaaatctgacaccagcttcccagttttctcttctgctctctttggctgcaacgcttttaccatggctaaaccattaggccggctctgcagggagggcaagaccacagcagctcagtatttcctgctcagggaaaaaggccaggtcttttgttggtggaaatccacttttccatccactgtcttctaagaatgaaagtaaatctgttgtgctttcctctgccctgtcctcaggcttagccttagtgggcctggtttttgcccccctccagttttagcttcccatctaaaatacaagggaaaagacagcaaggacaggacacttcctcctagtgtcttgtaaagctgcaagggagtcgcggctgagtcgaggatccacattcctggatgagtccttttgttaccagcggagggtgtccgggttcttggcattttgaagaaatagttggacaaaatgcacaaacaaagcaagagaagaatgaagcaacaaaagctgaggtttattgaaagcaaaactacactccatagagtgggaacggcccaagcagccactcaggggccctggatagagaatcttctggagtctaaatactccctagaggtttcccattggccacttggggtacaccccttataaatgaagtggtggcctgcaatcagtcttattggttgcagaaagcaaccaatcagaggctgaagtgaagttacaaatatcacactcctatgcaaacatctgattggttttggaaagcaaccaatcagaggctaaagtgaaattacagagttgctcttttatgcaaacgaagactccgcctccagtcagtatgattggttgtgggcagcaacccatcagaggctgaagtgaagttacaaagttacactcctatgcaaacgtctgattggttgcaaaaagcaaaaccactcagaggtactttcaatttcccatctgccctgcagaaaaggtaaggggttgcaaaagagtagcccctcctccttttgttacttaggcgtggaaagttaagggtttcctttcagtttggttctaagaagtcagagtgaaatggctttagattccctgcctgcagattctattccccagcctcactttgagaagcacctggacacttcgctctaggcacgtgtcttcttcaagctgccatccattatgcatagtacaggagctcagaaaagtcacccgtgggttcctttctagctcaatcatgctgagagtgcagtccatttataacataattcataaaggaacattctatttagttctcagaactctgtggcaggggactgttgttattcctcctttacagaggtgggtctgaaggtacagagtggataagtcattttctccgggccagccacacagcgaatgaatggagattccttgtgtgtagtaaatggctgcagccctataagctataatcatatatcatcaacacctttaccctgttattaacgtgtctgaaattagggaacaccacgtacaaaagggatcagggtccacctttctgaagaaaactgcagagcttttgcagttattaaactagcaacagatgtaaagtccaactgttagagtttttctttaaagcagaagttagcaattacaggtgcttgtgatgtcatcacttagatgatcttataaatgcctttttttttttttttttttttttagtcggagtctcactctgtcgccaggctggagtgcactggcatgatctcggctcactgcaacctctgcctcccgggttcaggcagttctcctgcctcagcgtcctgagtagctgggacaggaggagcacaccactgcgcccagctaatttttgtatttttagtggagatggggtttcggcatgttggccgggatggtcttcttctcttgaccttgtgatctgcctgccccagcctcccaaagtgctgggattacaggcatgagccaccggcctggccataaatgtcttttctgggtggggcatggtcactggaaatgtaaaccctcccttccccaggtcagcctgcctcccaggtgttggtgctatgattacagtgaccacataatttatcatccacactggcacctttttgagagaggatggggagcaggtaattatgctgggacaataggcgtatgtcaagatatctggtcaccctatctatgatctgtcacacttagtactttctaaaattctcgggcctttgcaccttctttttatcaacgcttagttctatgttactgaatatttcttaattaagtgcaggaaagaaaataaccattttttctccttttaaagaagcacacacacctttcttttattggtattacattccttttccctgttggtgcccctgttggttttccaaattgtcttcccatccttgtcctacctcccaatagagtacctcatcctatagtgttattataactacagaaaatatattttcattccttccacttcatgctttcagctagaaatgtgagtctctgagacttgtattcttggggtcacttaaaacatattgcataatgaggccttcaatgactctgatttggaactgaccctctatgaggggttatacccctggacaccaagctgctggcctgagcatgaggttgatggccaatctcaggagaggaggaggaagaggaggaggcggagaagaaaattgcgtgctaatttcagttgtatattgagcccacacatatttacttccaatatgaagcaaatctaagaaaaattctgctttaaagaaagaaatgtaaatcaagtgactgttgatggacgcttggaagaattcttatttatttatttttttggacaggctttcactctgtcagccaggctggagtgcaagtggcccaatcatggcttactgcagactcaacctcctgggtgcaagtaatcctcccacctcagcctcctgtgtagtggagaccataggcatgttccaccacacctagttaattttttattttttgtagaaatggggtctcaccatattgaccaggccggactcaaactccgagatgcacgtgaatctccagctgtggccccttccaaagtgctgggattagatgcatgagccacctggcccagccagaatccttccattaataaaaggatggaccatgaactcccttttatgatatgagccgatcaaatgtgagcagaatagtatcctatttatacaatgtagtttaaaaccaacttcttagaaccatgagctaagggggaatctggatttcaaatgctagttgcatcaaacacgtttccaccccctcaaaacgtggcccaaagtcattagtgtcggagcacccagccatccttggctccttcccacctatgttgattaattaaaggacccaagagctaaaagggagaagtagctgcatgcttgccacttagtaatattttgataagtatttttgggatgaatgcaatgatggatgaatgaatgaatgaatgaataacataggctacagtattttgtcttcttggttagggaccttgagtaaactgaggagtctgaggggaatgccatggaagtctgtaaacccaaaatcctcagcgaaacctcagccatctagggacatctggggcagcagagagccactggtgtggtgagttatctccctgggccttgagatagccatgctgttttgtctccacaaggaagaagtaggaggcatagcccaaggcagcttgagaggaaagcctcttggccttgaataagatgactttgttactgggcaaagaaagcccagctggaagtgctctttgatatgcaaatatagcctgataaggatttcctctccttcctactttccctccccaaccctcccccaagctaaaattctcttcccaggacccctgtcatcagcagggagttttctgtctttgtccccatctcttcacttgtgctctgcaaaatcaggccacgattgcagggtagtccacggcttccaaagagaactgcataaatatacatctttcaggggaagagggagaacctggagaagtcaggagagcaaaaccatgccagtcatcttcagtgatgataaaggttactgttggatgaaagtttgcattttgttgtggtgtgggaaggaccttatcctgtcagctctatggatgtgcccagtttaagctctgaaagttcctttaacttgaaattgtttttgatcatgtgacaaggtcttctgaccctttatcacccacagtgttttattcatttgctctaaaccagcagtaggtgaagttaggaacaatatgtcaagcttcctaactccatggtgctctcattgttgtgtgtgtgtgtctgtgaataaacacggaaataattacgcaaataagctattggcaggtggtgataatgtaaccgcccaatgggttcattctgcctgatgcccagataaagccgatttatctagacaggggaattgcaatagggaaagagtttaatgttggtagagccagctaaacgggagactggagctttattgttactcaaatcagctttcctgaaaattcagagactggggtttttttaaggatagttttgtggacaagagaatgggtactgctgatgggctgtggatgcaatcataggggtgtgtaaaacccttgtgccctgaatccgcttctgggtggggggcagggcacaggaccagttgaatggggatggggctaccagtcctcaaaaatgcaaaagccggaaaagacatttcagaaggccaaccttaggttctacaaagtgatgttatctgcaggaataattggggaaattgcaaatcttgtaacctctggaataatggctgctaatcgtttatgtccactctttagcagaattcaggctcctgtcctcctcctaacttggtggtcttttgctagctttacaaaggcagtttagtttgggggtagggccattatcatttaaattaagtactaaatatccccccaaagttagcttggcccaagcccaggaatgactaagggcggtctgaaggttaaaggcaagatggggctaggttagatcagatctctttcacggtcataattttcttactcttacaatttttgcaaaggcagttttaataactgctatttagcaaagacagttgggtaagttactagagggagtattaccttagatggggccaggagggtttctctgaggagatcccatttcaacagatctagaaatgtaatggagccagtcctagggaaacaggactaccaggaatcctcaccagccccgcaaagacgagggagcagcaagttccaaagcccgtggcatgtcaagggtcgatgaattcaccaactgcaaggggctttggtgaccccagtgaacagatgagaaaggggaggaggctgggatcagtgcacagctttgcaggctttgggaaggaatttcgagtttatctcatttgtccaggtatttggatgaagccctggcatactaaccctatgaaagtttatagttcccaaattgcaggataacaaggctctgtaatcttcatttcctcaaagttttacaccaggattctatggccaagtgtgtggcagtgtcacaacttaagagccagtgtaattgcccaacgggttctccttgcccgctgcctaagcaaagccgatttatcaagacagggggattgccataaagaaagagtttaggtccaggcacggtggctcgtgcctgtaatcccagcattttggggggccaaggagggtggttcaactgaggtcgggagtttgagaccatcctggccagggtggtggaaccccatccctactaaagatgctgatattggccaggcgtagtggtaggcgcctgtaatcctagctggtcgggaggcagaggcaggagaactgcttggacctgggaggcggaggctgcagtgagtcgagatcacaccactgcactccagcctgggcgacagagtgaaactctgtctcggaaaaaaaaaaaaaaaaaaa

SEQ ID NO: 58195 - DNA, 6604 bp, Homo Sapiens; identical to SEQ ID NO: 24675

SEQ ID NO: 58196 - DNA, 6527 bp, Homo Sapiens; identical to SEQ ID NO: 24660

SEQ ID NO: 58197 - DNA, 6386 bp, Homo Sapiens
gaagtgttgagtgcccagcctatgctgatattttaatcaatttttttttcttcttgtttacggcattattagccatagggttttctggaagggcgggggaagaaaagggtagaattcagagaatgaaccttaattttatattttagtatagatggcgacatttggaaatgatttttccacaaaattgcacacaaaagttgtccacaaaaattccattcaacaagtagtttccctgaagagtagcttccctggtaacagctctaaccatttcatgttacgttgctccctcaggaaaacgttttctgcattttaactgcaatcaccagggccttagctccccttggaatatgagggttccctcttgcatcagccaaggttctgtgcagtggggtggagtgggctgtgggcgggggcagagggagaggggaagatcaggctcaggtggcccagaactctctgcagctgtgccagagaaggcaccttcttgttattctggtgtggttttcataaaaagccctagaaggaatgaagtgacatgggaacaaatccctacaagcaaagctaggctgggtatagatgactaatcatattactcatcttggaatcaagttattccgaaagaaggtatattttaaatttatattaaaagaattttacaaagatatgttggaaaggtgtagcaatgggggcaggtaggttgagcagattaacagggtttccgcatgcacactggaagcaaaagactagacatcagaggcccttaggtagccatctttattttctgggaaccataaagaccccagcagtatggaccaagggcattaggggagaaaacactggactcagtatagcatggagtattcttggccatcccatttggatggtatgcactgctcaggggaaactgtagtcttggggctactggtatatatggggggctttgatgggtaaccagcttgctgtatgtttgtcagggaatgtcttagtattggtgccaaaagaccctaatcctgggaaactccacaagcctgcctgggcaagccaggatggctggccccacaagctctccaaggggcagggaatttgtgctgcatgaaggaggctgatgcagatactgctcaccagcgacacaggaacccagcctgggcaattgccctcaagcaagaaaaagggagaaattacaaaatcaaaacttggcgatcttgatgttccaaaaatttccaaaggtctttggtcagtaaagcaacaaccaattgtcagctcaaaggcataaaactggaagactagaacatactgatatattcatttctagttctgacaaataacttcctcggcaattttttttcacaaatcaattcccaaatatttttctatgttttagaaattatatgctggatatctccatcttttagaaaagttctccctatgtgagacatatttatttgttaatatatttactacttcctctgaaatactataactcttttgtttcctcattctgatagcttcattttagtcattttgttatgaaataaaatctggaagaaaaaagacatcgtctcgccacaccacacaggtgaagacagtcctcatcagtcccaatcctgatgtctggaattggggagcccatgggctcaaggcgggtgttccttgctacacatttatggatataaaccagagtcgttctgtagaggtctggaactgcaggaagattagaatcttctgctcccaggctactgagacccagagaggggaactgacttgcacaaggtctcccagcaattagggttagagaactaacctgtcccttgttgggaatgaaccctctgggtttagaggctcctagcccaggacaaaccaatctgtgttggataaagggaatggagagcagagaagggccgagtctgagaatcgggttgattaggaagcaggctggtctgacattgactacgtagggagggctgccatggctggtaccacctcttacctgttcctgagggcagggtaacctcccatgggaagagctgggtctctctctctctacactttgtctagcacaacaaacaggttgaaccagtaacatctcccagaagagcatgaaaggttgccacgtggcctgagcctgcagaggcattctccgcagggccacacggtggttctgcgcacagttaagttgttcagttttcatctctcaccatcttcccctcctcatcacctccacctggggctgcgtggtttctgttcagcgacccagcctcactgtggtggcagaggccagaaacatacccacaccatacagtgtgatgtgtgtgagaagggatggccaggggacagagcaaggtgaaatgtctgtccaaagtgcatgagagcagtctgcagcaaggatggcaggaggcatgacagtaaggtcatcccgctcactgcagtaggtctcctctttaaccatacacacacgcacacaattttctgtatgtttccttagcacccagaagttattcactttcaaaatgatcagtctttttactgaagcttactggctttccaactagtcctaaattgtgaggctttactgaagtacttgagcatgtgaagtgaactgaggaggaaaatggctttgccggcagagtttgagatgcaacgagtacaagccatttgcctatgaagaggctgtttcctccctctctcagggaggacaagtagccagtctgtggtgacatctgttgtctagatgcacagcttttcgatgcctaaaaaagatgctttgggtgcaggggtggaaagacttggttgtgccttagttttcttatcttagtcattcctgttaaccttagaaaaaaggtgaaaaacttactgaaagataagaaacaataagacacaattgtacattatttgggatcctatgcttggtagaattttcgcaatgtaaataaattacatctcaagttctgatccttttcagcagaaattctttcctctcccaagtctagtcactgagaagcaaagtgccgttgccttttatttcttcaatgcttctttttggtgcctgaatgcacaccaaggaagagctcctctccagagcttcactgcatcacagacttgtgcaggggtcagccagagtgtttctcaaaatcttttaagtctctgaattataaacagagctaaatgggaccttggagatcatcttgtccagccccctcctagagaaggagactgaagctcagagtggttaagtgacttgcccaaggtcaacaggatgctgtgttattattattatgattatttttgcatcaggacttgtgggatctgtagtaactattctcttggccaattataatcacatcactggcattgttttacgagaaatagccccgctaggcccagtcagcaataagtctttggagctgtctcagcctgcagttgctttatataaaccatcccttttatgggagttgaagcactgtatgaaaagggtttttgtctcatgttgaccttgtttagtcacattaacgcacacatcagttccaggccccattccattctctgaacatcttctgacacactgacagtgctgagcagagcaaggttgggttcgctcctctggcagaacctcggctctcaggaggtccttgttccagggaacagctgcttctctggggctgggctctactccctgcagcccctcgcactacccagctggaaccagggacaacgcctgagtccaaccctcgtgtctattttccagaaaacgggcaatgctgtgagagccattggaagactgtcctctatggcaatgatctcagggctcagtggcaggaaatcctcaacagggtcaccaaccagcccgctcaatgcagaaaaactagaatctgaagaagatgtgtcccaagctttccttgaggctgttgctgaggaaaagcctcatgtaaaaccctatttctctaagaccattcgcgatttagaagttgtggagggaagtgctgctagatttgactgcaagattgaaggtaagttgtagctgtgcttctcttcaccatgaatagggtgtggctggatggtagagtccctaccatgcaccctgggcaagaagtcagttctgtgcagctggggacaatgaggaactgccaagctttgggggaaactgggtcagcaggagctgctcataaagggctatgccctgcactcccacctcctgaaggtgtgtcctccagtcacttccccagggggcacatttgaaatttcacctacttacatcagccactagacctaagtttagaaatggccttgcatggacttacctggctttggaacatgcttagtgaaatgagctttgcaaactgctgaaaagcatgtgacttgcccatatgaggccctcaaaggaaggctggcaaaggcataggatgtggaatcggcaggctctgctactcgtccacaggctgtgtgaccttggatggtggtccaactcccctgagttacggtccctctgctgtaagatgatagctaagtcatggagtggctctggggattctgtgaggggacatatgtgagaagggggaaccttttagatcttgtaaagatgtcacagagcaaagggaaaagttgtgggactggcaggtacagagagagtgcatgcattgtgacttcagactgaggccagttgggagccaggcacccgggacaaagcactcagccggcaccatcttccccaggctgcttatctgcctgctgggaataatgcggccacagacctgtcagtggtcagagctcaagggaccttaaggggtcatggcatagcacctgagaaatgagcaaagttgatgacacaaagcgtttccattttcatatagattgcaaccgtctagaaagagaagggacaagataagacaggctctttgcttcaagtctgtgactttcacctgccaaccagggtggtgggttatcacccattttggtctgaccaaataaagcacagaagtttattaggcaactttcccgaggccgcatagcacagtacagcagtcaaaacaaactgtgcctcccactttctttgattctccagcaatgtgactagacaatgccttttgagtaaaataacccaaagttaggaatggaaaaaatagtttttcttctgcatctttatattatcaaagtgccttatcaatgcttcgcctaccatagtcattttcctttcctcactcaattaaaagaaagtggatgtgctgcctttgataatgtgaaaattctcggactggggattctgctgaaggctctggagccactgcttgcaattctcaccattaccattgcatttgggtcttctgaagtttcttttcctttttgaatgttttaaaataacataatgattatcattttgtacttaattttctctttgggattgtttcgtacttaattttctctttggaattgtttcattgatatttatgtaacttttgcctggggctctgatgagaaattaaagcatatggatgctgttttgataaaaacaaaattgaaacttttgcactgagggtgcagggcatgggagtggagggtactttatgaccagctcttcctgacccaattttcctcatggtctgggtgttcctaattacttcgaaaaaacaatttctaaaattattttgaaaaaacaacattgaaaagaacattagaattcttgatttcttatgtataatttttattctggttagggctcatattagcctgtttgcattgctgtaaaggaatacctgaggctggaaaatttataaagaaaagaagcttatttggcttggtgccagtatctgcatccagtgaggcctcaggatgcttttaatcatagcagaagcaggcatgtcacatggcaagtgagagagcgagagagaaggacgtgccacgttttaacaaccagatccgcatgaaatgacagagcaataactcacccattacctcgggaagggcaccaagacattcatgagggatcggcctccatgacccaaacacctcccaccaggccccacctccaacactggggatcacatttcaacatgagattcaaggggcacaaatatccaaaccgtatcagggctacaatttttttcctataaaaatacttcaccaacatttaagagaaagtcaggtggaatatattgtatatttttaaatgtatgtatatatatgactttaaaagcggggtacatgtatatactatgtacctgcaaacaaaatgcataatgttggtaatgcttctgtacatatatatgtacacatacacattaaatacatataatatataaaaaaaaaaaaaaaaaaaaaaaaaaaaaaaaaaaaaaaaaaaaaaaaaaaaaaaaaaaaaaaaaaaaaaaaaaaaaaaaaaaaaaaaaaaaaaaaaa

SEQ ID NO: 58198 - DNA, 6363 bp, Homo Sapiens
ataatcttcctcacatagccccacgacttcaagcgtcaactccttaaggttttgcttgcacgtcagcttctcacagaggccttgcctgtcattcttgtcttcttcctgctttactttttacttcttcctgcttttacttttttcctgcaatacactttaccatctaacattgtatgtgcattatttatgttgtgcatggtctgtttttctccaatagaatatgtattacataaaggcagagatatttacttcttttgttcactgcttgatcctcagcacctagaagagtgtctggctcgtattagttgctcagtatgtatttattgcaaatgaatatatattacataaatggtgacaagatagataatcaagagcctattagtgtggttatgaatgatcatattatgttgattagggtaatggtgattagtttcacagtaccgtatctgaaatcagctgaagcaatgaaagttttagggaaataaagatgatttcagagcattgtacacttagggcaaagcgatacagaatagaggggcagggtaaagaacaaggcaaagaaaagaatgtaggaagatattttttcaattgaccttgaactttgtgggaagatattgatcaactgacctagaactttattaaatctcactgtgactttgcacctcctgagtattctagccctgcccaatgtagacattagattctacatggaaaaaaatgtgcattattttaatagtcccgtaagttgatcctagttgatagaattttaccttttgtaactgcatgaatgttacactttgaagagtcggtcatctctcacctgtactgacaatgctgttcagtcacccctttatctgatgctggctgctccctttccagactgttgtgcacccagtagattccttgcatatcagattgagaactgatggatctacttttagaagtttattaaacttagggccgggcacagtggctcacatccgtaatcccagcactttgggaggctgaggctggcagatcacctgaggtcaggagctcgagactagcctggccaacatggtgaaaccccatctttaaaaaatacaaaatacaaagtgcaaaaattagccaggtgtggtggcggacccctgtaatcacagctacttggcagcctgaggcagaagaatcccttgaaccctggaggcagaggttgcagtgagccaagattgcgccactgtactccacacaccagcctgaatgacagagtgagactccgtctcaaaaaaaaattcagaacagtaagatcttagcctgggtgtccttagtctctgcctatgcagaatgtgaatcatcctgtttgctttatagtttatatcacagtggcaatcatatccctgagctgttagggatcaaagtttctacattgttctcatgtacactaaaaattattgagaataaaatggaccactgtacatacataaagtgtaatcatttatttaacagccttccaattatgaacatttgttttaaattttatttttaattttctctattaataatgctacaatgactatccttggattatacttctgattatttccttaagataaaaattctgaatatggaattacaggatctgaaaaaatggacacttttaagactgcttgtggaaaatattgttgaattgtcttacagaaatactttgacattttagtcttctttacagttcatgagaaaaatatttttgccccgtcttgatctacaattgacattaactctcctctgtcttctgatttcttttattcattggccttcttttctaattgcaaatatacacgtatttctgtacttattatattaagcttttttctaatctttcttctcataaatctatgattctttcttatttttttctccctgccaaacttaatgaaaaagttctacttgctttctccatttcactgctttttaacggccccctttcttcctttcttacttcgatgaaacttctctattcctaaggtcacagaacaccacctgtggaatagctacagtggcctacttttactcctctttcttgttgatctttccattactttgatgtcattctccctcttctactcctcaaaactctcttctccttgggaggaaaaatcactaagacctccaggctctcttcccgacccttagattgatctattttgagacaccagtgctggttgatccagtgccttggccattggtctaagtatggggaaatcccattttcctgtcttctatcctcttttcttttcatgtgtgctcttagctcatggctttaacatttgacatttgtatatgttaatgattatctttctctattccaagtgagtcctctatatttaatgccacaaaaatgtttgcagttgtctgctggatatatgcgtgtcaatacacctccacttattataaattgacccaacctgaacttttccttctttcttaccaattttgcctgtattacatagttatgtcactgttaatgcattccctgaagctagaatcatttaaaattaagcatatctcttctctccctgattccccatcccaccagctaccaatcctgttggttctaccatggtcatgtactttgccacccttcttttcatttgttttcctcaatggtggtaatcaatcggatcataaagcatactctttttagcacttcattaatattctgtcagatcctgaatactattggagatcaaaatatccaaaagacatcaagatttggccccaccatgaaagaacttcgaggcaagtaggagggacacgtacaacaatttcaatttgatgtagtgctagacatatgaacagaatggtggatcacaaaggtcgaccagcttagaggtagtcgtgtatatatagagagaggtctcactagtggaagcctcctggagaagctgagtctttattagtgggtagtgattagccatgtgacaaggcaataaaagcagttattattaacaaagggcaacatcaggagcaaaggttcagatgccaaagccttgttcatggctcccaccagagtctgcacacccccttctcccaacccaaggcacctcctcacctaaaatagaagtagaaagccagaaaaattaaacttgtatgtatcccaccttccttaacatctcttttgactcttgtactgctttgtgattaaatccagattccatagcatggcacacacaaagccttcccaatcagaccccaattcattcctgcagcctcaccttccaccatctactctccccctaatagcaatgctttgtcacagtcttcatctttttcttcacccaacaccatttttttccaactcagtttctttgtaaatatctaaagtgcttctcccttctaatctatataataattactttctaattctctaagctctagattaactttgatctcttctttgtatcacctccttaattctctaggcagaattaatcacactcacagcacttgggtttttacttccgttatagtcattacctaaaggacacaggtttttccatcaagagatacgaacctcacaatggctatattattcatattcttcatttgttgtgagcacgtgacaggagtataatatagtctactgaatgatttaactttttatctaaccctgttttcagagccatatcttgcttgtgtcaatagaagaagccttttcaggtgtgtttgaggtgaccgtaccaacttttcacaaaaatattctatgttctctgttgcccctggtgatcgttttgacctgcccagaattctgaccgtgagacacaatctcattttagtgtggtgaccgacatgtaaaaacatgaccaaagaacatataactgtttatgcttttattttttgaaagtgttcagatctgtgcatgagtactaaagattttatggcagaatagggatgtcacagagtgatttaaaaatgtaaaaaaaatgcccaaacacttcacaaaataattatcatttatatttttctccattgttgaaataggaacggcatgctaactagttactttacagaagtttcttttaatgtaacaccgtacactgtaattaagataccagtgacatggtgggcctcagagttgaaatcctgcattttgcataggattttttgttggtttcatttcatataaagattttataggcaaagaatatgaattcagaaaaccgacataggataagtgagcagccaagggtatcattatgcttattttttaagttctttagcgcagaggtattcgtagccataaagattaatttgctgatgtgtaatgcccatttctccctccagaacaactactgaatataaatctgttttagaagagaaagaagtctgtttcagaattttccttgtagggttggacaagctctgatttgccacatcagtctagaaagaatgttgggtggagatgtcattgaacgctgcctaatgaggtcatgccactccatgtaacacagaccaacatcaatcatgagctatattttttaaaataattatttatctttgctaaacttggtacaacttgggtaattaaatatataataaaaatgtgtatgataatccctaaatatgtatagtgctgaattgtttattaaatttttaaaatatgctattttgcttaatccttataccagttttcctaggtaggtggaatcatccctcctttgaatacctgttcctacagacacacacataaatgaggtgttcaccatgtaattttgacaaacgccccattttctatggctggtaggtatgcctcccctaccctgaagaagagagtactgtttgcattgtcagcagtaggagagttagtgagtgccttctgacaggataaaatgtacctgggagggatgaatggcaggttgcaggaggcatactgcattaaccgaggcttgtgaaatctgtacaaagcccttccattgagttccactgtgaataatctatagaatgcttaaaataaaggccattttttaagtttgaaatttaaaagcaggatatttttctagaaaagtaattggtatttttactaatactctattgaccatttgttgtagaatgtgtaaatttctgttatttaattcagacaacaatggcaaaggcattgtttaacagggagaccagttagaagactgtttcacatgttggcctgaattgtaaagtggcagcaatggaagtagggaaaatggtcagattccagacatagtatgaagattgagccaagataacttgatgtgggatatggagtgtagcacagaaaagagaggagcaaagtacgactgcaaattacggaattggcatttactgaaatggtaataatgtgttgataagaaataggaattttctggtagtccgcgtataaatgatatgcaatgctttgaaactatagaagatcaccaaggggaagcatgtagacagaaactagaaaaggtccaagcagagatccttgggacactccagcatgtaaaaagaaggtgataaggaggaaccagcactcagagctaaggagaagcatcttgttaggtaaaagaaaatctgcagagcacagtgtgtgaaaagccactttcacacactgattggtcagttagtaaggctgaaaaaacagaccattggattcagccatgtgggggggtcattgctgacctttgcatacattctaatggcttcccctgaattagctcatttttcccctcaaagcagttcactgggggatttttctgttgccctctcagtttcagctacttaacactctttttatactgtcaagacattttaaagtaaataactctgtacccttatttcttactccaaagtaaggccttccactcaaggcacatacaaagctagaatgaagttgagtgtattatccaactatttaacttattgaacatataattgacaatgtctaccaatatagccactattcctgagctagatttccacaaaacattccacgatttcccttaatggtggttgagtgatacattgaataaatattgtactgtaggataaatttctgtaagaaagtgtcttcaaagattttgggtttgaggtatatattctttcatgttttgcagtgaaggtgtgtttttcttccaatagttcttagtttacattttctttcattggaagttcatcactgttaggcgttatcttgagtattataacaaagcaaatccacaagtattcaatataagattaggaaaaaaattcctgcgatactttgttgtcaaacacttgccactgatagacgttattttagcttttaaggcctgtcacattgtttattcagaggaattgtttttcaaattttaggaaaaaaaaaaaaaaaaaaaa

SEQ ID NO: 58199 - DNA, 6309 bp, Homo Sapiens
caggcgtgagccactgcacccggccaatctagtgaattgagttttgtaaacctccttagcatatcacacaacactaattttccactctcaatatgtggctgtagagtgtttaatgtttactttcatatcgcttttccatagtagtgcaagacctcagtttagcttgtttacattatttgcagatttacttacagtgtactatttatttctgttttaaatagtgtttgcaataggagaaaatcatatgatcttaagcatatacaccaaaggtaagaaaggaagccactattgtatctttttgatgaattccagatgagctgggatcaaattgaactgcttaggcagaaatttaagagacaagtagaagtggtgcagaaagacattgtgactgcaatgtcctatttacagctactgcccagaggagaacactcccaacatgacaaagagttcatcagcttgaatgttaacttttgaaaacaattaattggcctagtgcagtggctcacgcctgtaatcccaacaatttgggaggccgaggcgggcggatcacgaggtcaagagatcgaaaccccgtctctactaaaaatacaaaaattagccaagcatggtggcgggcgcctgtagttccagctactcgggaggctgaggcaggagaattgcttgaacccgggaggcagaggttgtagtgagccaagatggtgccagtgcactccagcctgggctacagagtgagactctgtctcaaaatcaatacaaaaacaaaaacaaaacacaattaatcacagcaacttatttgtactcttgtgtatatttgataataaattgaacaagatatgtctgtacatagtatttttttttctgtctggaagagatgggaacctgacagcctttatgttaacttgaaatctgttgatactcaattgaatcaaaaggaagcagaatccttaagaggtaatatataaggccttttcttcatctgtcttggcttttgtaagacaccactacccttattttaaaagaaaaagcatcctaccaaatttcactgctttagaaatgtcggaagccagataaattcaagtttcaaatttattccacgttataaatatttatagataaggagagaagatcaacatgtcaaactggttataataacaggaactatcaataatttttatataaaggggaaaatacctgtgtgaaataggaaatataatcttgaaattgacagagaaccaagagcaaaaaataaaaagcttttattatactcagttaatcaatatgatatcgtttagtgatttatggaaggctagttaaatgttatcactttattagctcatgggagggagacccttcttcttttctatgcagttctgttgcaaactttttattaataaattctttaaatttgttttaattgtaagtgctattttaaatatttccccctgacccaaacacgttaaagaagaataatgccacatttactttctttgtaaatcctctcaatatttaagtatatcgatgggaccaatacaaataaaaattaattatcttagatatttgacaatcgctattgagttctggcatagtttctataataactcgtccaaagcggtgctcaagagtggccactggtatttttaagcatggagagagctttgttaactataccagagctaacattttaatttggtacaagttgagtatccctaatctgaaaatctgaaattcaaaagctccaaaatcacaaactttttgagtgctgatgtgacaacacaagtggaaaatatcacacctgacctcatgtaacaggtcgcagtctaaactttgtttcatgcccagcattatttaaagtattgtataaaattgcctccaggtataagatacagatgaaacataaattgatttcatgtttagccttgggtcccatccccaagatatctcattgtatatatgcaaatattccaaaatctgataaaatccaaatacttctggtcccagccattttggaaaagatactcaacccgtactttcaaatgtactcttttatggctgaagaatattggttatagcatctccacatgcctagtctcttccccttcactcaggagtccctttgtgagttattaaataatctcatataaaatttttctctccccagttagaatttgttcattctggattttatccttttaggtcagtggttctctcaaagtgtggtccctggaccagcagcattaagcatcacctgagaatttgttagaaatacaaattcttgggcctcaccccacaccaaatgagtcagaaactgggaggtagcgcccagcaatctgtgttttaaccagctttctagttgtttctgatgtcccctagagtttgagaaccactacttttattgtacctagccaatcatatgctaaatacagacagtataacttcagtttggaattttgggtaccttgtcaaaaagtggcggagaggtttttgctcttagaggcctttaggctcttaacttcacccattgtagatgaccacctatgcacataataaactgaaggctgacttaggaatggcaaatgtacatgaaacctcaggccaatactttcaaattccagccccttctcatagtggtgctaatctgactttccggccttttttttttcttccttccttccttccttctgttgtttttgtttgtttgttttgtgttttgtgttttgttttgttttttttttttgagacagggtctccctctgtcccccaggctggaatatagcgagctcactctagcctcgaactcctgggctcaagccatcctcccagctcagtctcccaagtggctgagattagcaggtgcaagccctctcactcagctgttttattttgtctttttttattttctgacaggatctctccactcctgtccaactgttcttctgcattacttttttaatttttgtaaccttgttcacattctttccttcacttgtaatacctttgtcttccctgtctgggcagatcctacccattcttcagctgtaattatttccttctctgtgaagcattctcagtcatacaagcgtattttctctttctcttctgaatttataccacataatacccatagtactaatttgaccgatggttaaaactgcctgtgactctgcattccagtgagaaattgccacctaagttttcatgtgaacatgctatgtcttctcatctgaaaagcagggctaatgatagtacccacatcataagagttgttgagaggattgaatgagatcatatatgtgaaatgtatgtagaagagtgcttgactcataggaagacttggataactgttaacgatcactcgcatcttcacaactgtaccccacagtcagaacagcagctagatgtcatcttttgtgaaaatgttaattagctgatatctaggcctcatgctgagaagggatcagatgccacatatacagttagcagcaaaggcagcctggcaaggctcagggtgaatacagtgggcaagcacatgtgtggtgcatttgatgtcctgttgtgaactttctgagagcaggactgtctttgtagctgatgctgtcactagacatcatcactctaccaagtactgctaccactgtgagcctgaatttggtgaagggctttacaccattgccctcttcttcttcacagtcactttataagattataatctgcatttgatggaaactaaggctcagggaagttaagcagcctgcctaatataaacagcatcgttcacttgggtcttccttgccagcctcacaacacctgccattgtgctttgctcccagtgaacattgaagtatttgttccttgatacctggtattgtgtcgcagtggacatacctctcatttttgttcatctaggaaatgtatcttgtattgacatacctacattttcttcatttactctgctttgagctgtgaagagggtagaactcgtgtctttaccatgtcactgtaagtacagtaacacacttgcattcacctacatagtaacaaactcttaggtattgccctttctgtagggttcctgatgtctggtttttataaatgcccttgcttttgtgccttttagactggcatgccatttctgcttaaggaattttaaacgtgtcactgtgcagtgctttaacattgtgctacgtatataaatcatcattttgaattggagagtaagcaatttaaaataatggatcattttatttgataatgaacatagtcatcatccggaagtatatgttgaatagccatccatcactctgctcttttctaccagacatttctgttactgggagcttgtaatctaagacactccaaggtgaactgctataaaggtgatagaggaaattggacacatgttgagcaaataaatgtattaaaatgagtaacatgtattactgatatgtctgaagataactcaaaccttaggagagaggtcactgaggaagagccaccagaaaggcttctcctaggacctagaggaatttggaaaattacctgaattataaataatgttcctaccatgttatgtgaaatgtagttacattaagacaaacaccactgattttttttagatgattagtgtgaccataaaaatgttttatttgcaagccaaagcccctaatccttcttatgtttgctacttagtctttaaaatttttaaaaatcctttcaaagctttgttagataatatatttacctgtacatggaggttaatttcagtttgccttatgagaaacattgcaactgttatttcaccttttcattaaagtattattgatctcagcatattgagcaataaacatttcagttagttaatatttgttctacagccatgctggaaatattatgctgaagtaaaaccaattaacgtatttcagtaaaaatgttacagcctgagtagctgatgttatacaaagctaggctcttgctattagaagaaaaatagtatacagcatgaattcaattcctgagaaactcaaagcctaatatagagaattgagaaattgaaaaattggaggagagaaaaagcagcccgtaagtatttcagatagtttcaaaattgatatgactggctcttagtcttcaaaaatagaattatctcacttgaatatttaaaaagtacctagaattttcttctctgttctgtagtgaagatgggaagtcactgacatgaaattacccaagaatagaggccatgttatcaattttttttcactgatgcttgactcatactcccggttaggacatccagtttctgtttgaacactgccattgatgacatatgagatgcagtctgctctagtttggaacagcttcttagaaagtcctttataatgtaacttccagccattgttcctggtccctgcctccggggccatatacaacaaatcttaccttcttccatgtatcagcttctagaggatggcatctgtaccttattgatctttgtactttctggactctacacagtacctggtccacaataagcagtcaataatggataggatatgaatgaaaagaataataaacataatgatcacatctcaactttctcttctttgtaagatttacagaaaggtttcactgttaatgaatcttcagaaaagaatacagcttgccattcctaccctactttatagccttttcttctccatgtttggctgattttttgagttcttaataaattactttgtctttgaatgaagggttctgttctatagcagctagaaaggatgttttcctggccgtggttcttatctggtttgtttttgaacatatttcccaaaaaggaatccaagatgctttttcttagccctgctaatatcagatgttcactgattcatgacctgagaaaaattaaggtgtcctaaatgaaatgagactgccagaattttaatgacttgaaaatatgactcttatccctgatactgttcttcaagaaaataatgcttggcagaattaggtgcattagagaagcagcactggtaagtatgaaaatgtttgttaaagagggaggagactgtatggcagctctgctttccagagattgtattcagcaagtaatgtacaaaatcagctgatctcacgacattttaaaaacatgccaagcagtgcttccattagtcggaaactgaattgcttccattattggaacatagaatctaccttaagaaacatatactcataggtgggcagatcacctgaggtcaggagttcgagaccagcctggccaaaaccctgtctctactaaaaaaaaaaaaaaaaaaa

SEQ ID NO: 58200 - DNA, 6212 bp, Homo Sapiens
aagcagtggtatcaacgcagagtgcccattatggccgggagtgagtttcaggtttttctcagatataagagattagttgatgattatatcaaatgatttaatttgtggttatgattggttgtaggaaaaatttcactagcacccttgtgatagcaatttctttttcttaaactaaatttgttttattggcttcaatatttttgtcagttgtggtccagagtggtgattactgttaaatatgaatttagattttttgtttgtttgtttttaaaataccttggtttttcttttatggtaacttatattgggtttgaaagagcccccagttttcctttagcatcatggcctcttatgttgcttgaaaggaactttaacataaatagtaacaagtcttatccagtggtgaatacctaacttggttacatctgtgcaaagagtagttagttctagtggaaaaacactaactataagggatagtgctgtacttgacctatttgaaatgttgaattccatctgtttggggtacaaacaatacaagtctccttatgccaagtaaagtcatggctattaatttttctttaatttttctcaacaagaatagaaaatggaatgttacatctggaatgtaatcggaaattcactgtagtcccttaagtacttgttgacttgacttactgacttgaaattcccttgaccactgccttcctctgtttcttgctattgaaaagaattgggtaggtagcagcatttttcttcatgttattcagtccccacctgctgtgtggtatgtgtatagtgtggtgaagggagagggagggaagataggaatctattggatatctactgtgtattcagctctgtactaagtctagaagtatcaaacatttgaatttgattaaacagtatgagatcatgtgtaatctagggcaaagttgcatggtagagattcacctttgtgtgtgtgtgtgtgtgtgtgtgtgtgtgtggcacaggattgcttatttggactccataaatcatttgttgagtgaatgaataaatgactgatggactatatgactgcataaatagaagtgctgaaggagcttatgcatatgtcttcattcattttatctcttactgcatccagtcctcctgttcaaaccttgacctgatttcagatttttgactcggctatattccataacgcttattcctttttcttctattcctctgaattctggatgatggcattaaaaccttaactgggtgacctgcctccagacctactccatttacctaaaccattattcagatgatagctaccatctgattcaagcttgcatagaggtgttcactagatccacatgatattagcgtaaggcactagatagtagctttacactaatatcaagtccaaacttgttagcatgtcatgcaaggcctgtctagggtaataatttaagatcatgagctttaactcttcaactatcgtaagactataaattttttgaggataggaattctactgaattgtaccacatgcttctgttctcctgctaattcacctgattgctcagtatatatgacttaattttctttcagctaaagaaagggttttaagtaacttgcggaagcatgaggctccccagcctccccttgttctgcacccgacgaagcctcctgtgccagttatttcctctgctgtgctattgagtcagaaggacgccacccagctggtgtgcacagacctgaatctgttgcaacagcaggccaggtaagaccatgcagcctcacggatcatgttcccacgttggtggctttgacagcctggataatttgctacctggagtggcttccttgtcagcatttttacaatgaggatagtttgaccaacctggcccagacggttcacttggttaaccaagttgtgacaagtcttataatttcacatcgaaattatgtgttactctcaccaactatcaatttcacatttcctgtggtggcatttctgagcatcagcagtgccagctaagattttcgtatgcttctcatgaagagatcttctgatattggaaagatgatgttggaaaggtgtgaagtaagagttcctttcttttctcattgctgtactctctacttctccatattctttaagaaattgacataaatattgattgaagtgtggaaaagtcattgttttgagttcacaaggtggatacaatatgatcaaccatttaaggttttgatctaacttgagatcttgtgagaaggagcatacgtggagtaagtctgtttcattaacagtaagcgagccttacttttacaaatcctatgtgaatcaatttcctttttttttttttttttttgagacagagtcttgctgtgtcgcccaggctggagtggtgcagtggcatgatctcggctcactgcaaactcagcctcccgagttcacgccattctcctgcctcagcctcccgagtagctgggactataggcgcccactaccacgcctggctaattttttgtatttttagtagagatggggtttcactgtgttagccaggatggtttcgatctcctgacctcgtgatccacccgcctcggcctcccaaagtgctgggattacaggcgtgagccaccgcgccaggccatgaatcaatttcttatcggtatttttttccttgtctgtttttggtccaggcatttgttgcgtgtgtgttgagtgcacatataagcacctgcccattaatgtaatgatacataccgttagaccagttttgacaccccatgtatgccattagctttcttggtctttgacatttcgttttgagttgctaatacctaagaagtcattggtacttataattaaggcaccccttgagggtgatgaagttaggatagaattctcagttgttcttgtagggtctgttggtataacatggattctaaatggagctttgtttgtggctatcaagttgtctcacttctctataggcttttctttcatttcttagctttctctttagcctctctgctgggggatgatttgggtaagtcttggctcacaacctttggtcctctgttactatggtttatgtgtcttttgctgcactataatgctggctgtgggtaactggaagcctttatcacctatcatataacctttcctaagactttcttttacctcctgatgatgtttttcagaaccgcagctcttcgggaatctcagcaggttgctctggatggtgagctgttagacacaatgccaaagcagtatgtgaatcgtgaagaacagaccacactacatttggagtgcagaggcagcagcggtaagaaatgccaaggagccgcagttgtcacggttcaggtaagtgtttaaatttcttcagaactgagagaattttaattgagtccgtaatgttggcttatcaatgagaaagattgaaagacatatatagcacactgtctgtgtcccaaacatttactagttttgcagggcatgaaaacactcatagagctaatcacacatttttgtaggtaccagatgagtcctataagacagatattcaaataggaattaaaaaaaaatcagaatcattgagaagattcctagagagagggcttcaactgattcctttttttgtttgtttgttttttgaaacggagtccccgggctggagtgcagtggcgcgatcttggctcactgcaacctccacctcccgggttcaagtgattctcctgccccagcctcctgagtagccgggattacaggcgcctgccaccacgcccggctaatttctgtgtttttagtggagatgggatttcaccatgttggttaggctggtcttgaactcctgacctggtgatccacccgcctcggcctcccaaagtgctggcattacaggcgtgagccaccgcgtccggtctcaattgattaaaagactttggtgatgatacagttagaaggaatttggaaatggagtggccatgatgtcatttaggggtcggtggctaggtcagcccgttccaagtgttttgggggtgttggtgggaattcacattggaaagcttggtgtgcaccatcattgggaactctggctgtctgctgcacatggcagggagcccctgaagatgaacgtgggaaggatatatgggaagcagattagtcgggtggaacttgctgacaggcagaggagagacatgcaacaatgtgactgaaacttgaactgcctctcagagttaccttcttgcactggaatataggcagaatttggatctgcaatatggtatgcacttcacaatggaagcttcgctgaagctagtgtgccatagcatttactttatgccaggccctgtctaaacactttaaataagttattttatcctcacaacaactctgcaaggtggcctttatcatattatcttcatttctcaggtaaggaagtagagtcacagagaagttaattaagttgctcacctgaagtgccacagcccgtaagtggcacagccagaaaggcccaggcagtccggctccagagccagtgctctttttaaagtagagatggggttttgtagtagagatgggattttgccatgttgcccaggctgctctcaaactagtgggctcaagcaatctgcctgtctcggactcccaaagtgctggtattgcaggcctgagccaccgcacccggccagcctgtgttcattaatcaccgcactgtattcctccttcgagtgaagtcagtattccttaagctgaaagagaaatgcttggagattagcactgcctattgtctaaatctgtctacacacaaatgattcttttttgttagcttttggaaattggagaaaatttattttactccctcttgtttgtctttcagaaatttcccttctttttttgctaattttcattgtaactattccaatgtctccatcaatttccttgggagactcttttctacaaaatgtcttctctgaaataatcttttatatgtattgtatttttcattactttcaaaatgtgtctctgatttttcaacatagttgtatttgtctaaagttcagaaatttgacctaaaagttaggatgagtccaacttattttcccgtatgttattgtaaatatgtgcgactcttaaacattgagttatctttggccaggtgctttatacagttggttttcttttggtgtatttttttcccagttactaatgctgttatagtaagaccaaggtagaaatatttaagaaaagatcgcttgctgaagtaataaaactgggagaaaagtttgccaattttgggtggagttcgagttagtgagaaaaaaactgaaaatgtatccggttttaataaaaaaaggggtgtcttcaccaatttgtgtttttccatattttaaaactacatatctttgccagactgttaattttatatagagaagagaattctaaaatgcatttttataagtgacaagtgagataactataaagaaatgtttttccagttctggctgatggcttgctctgtgaagaactgtaaatatttactgcctcagctaaagaacaggtctcttgccctgacctcctgttaactctctgggccttgcagtggaaaataccaccaggcaggccagggagctgaagctctaagcctacctgtgacttgtctcttttcctttacagaaaaagggatcatagtattatattatttgtctgaacccttgaattgagattttaaacataatcttttgctttgttaattctgaaataaaaagaaacaccttttctaaaatgtcttctaggtaattttgattggagggaggtcagagaaaagatgatttatgataaggactgatgtgaacatggcttagatgtttttacaaacataccaaagttcttgtgctttcttttctttaaagaaaagttgggctgagcgtggtgggtcactcctgtaatcctagcactttgggaggttgaggtgggcagattgcttgagctcaggagttcagcagcctgggcaacatggagaaactctgtctttacaaaaaatattatacaaaaataagccgggcatggtggcgcacgcctgtggtccaagctacttgggtggctgaagcaggaggatcacttaaccgcaggaggtccaggctgcagtgagctgtgactgtgccaccgcactccagcctgggcaacagagtgagaccctgtctcaagaaaaaaaaaaaaaaaaaaa

SEQ ID NO: 58201 - DNA, 6142 bp, Homo Sapiens
caaaaaacttaaaaacccagcttgggctttctagatattaataagtgctcacagatgttcgttgctattattagtctattattgccaataacaggtgggcaaaagttgctgtgggagcatgttgagcccttcagtgacagttttccaggtggtagggcagccctagccaggagaacagcatgtgcagaggcaccgaggcttaaaagtgctggatgtttttggagagcagtgggaggagttgctgatggagcagagtcatgagaaagtttgatggaggcagaagcaaggccagggaggtagcagaggctatcctgccgggagccccgaaggattaaacactcactgacccgaggcagtccctctgcaccttccttggagggtggttctctagtgagggttgtccaggaaacttcaggattaacttttgcatgggaggaagggctggtctctgctcaactatccatacattcaccatccttccctcttcattccacccaggaagcacgaagaagaagaggtccactccctcttcctgagatgcttttcccacctctgcacttgtttctctcttcctgggactcagtttctcacctgagagaagagggtagaagtggaggaagcgtcatgacctgactcactgattgatcatgatatagcaccaagtgcatttctggatgctggtcactgtcaaaggtctttacttgcatcgccattgaattctcataccaatccgttgaaatgaatgcacttatcccccactgcacagagggagaaaccgaggcacagagggtgaggcaatttgctaaagggcatgcagcttgtaagtgacaggaactcacgtcttggggggcatctcaaagttgccatgtgctatccttcaccaccttcttcacacactttgtaaatctaaggctgactgcagaatatctggcctcttttgctttgtgtacctttgggcgctgggcagtaggcattttggagatgggtcacagtggggtgtgctctgggtatgtaacctgactttggggaaattcctgggtgcagacgctttgtggggaggtgttcttggatgtctcagaatctagaatggcattccttcgcccacagatgtgccttgatgcaggcaatgtgcagcttgattgatgtggcagatggtggctgagccccacggtggccccaggaaggaatgaatgaatcttttaggatggctgatcagagcatcacatgaccacagaccctccctgtttcagaggacatccaaacacaggcttacatttccttttacatgggggcaaagtttggggccagggttcaaatgctggctctgcctccactggctttggggcctagggaaattttttcacttccttgaaccttaatttcttcatccggaaataaagatgaagaaataagttgctaattttagcatcttcaataagttgctaaatagtaactcacaaacacaattctgaattgtcataaggatttgtaatcatatggaaaatgcttggcttccaagctgtagataatattgatgtaatatccagcagatttttctctgcagtacttataattgtgattatatggttatatgtgagcattactcttttagtcttctgtttcatccactagacctgtggttctcaacttggggcagtttgaccctccccaggggatatttggcaatgtctaaagacgtttttggttgttacaacttttcgggggatagtgggggagaggagctactgacatccagtgagtagacaccaggggtgctgctaaatatcctgtggtgcacaggagagcacccccacaacagaaaatgatctgatcccaaatatcaatagtgctgaggttaagaaagactacactggacgatgagccccataaggtccgtgactgtgtccaattcattcagctgtgtgtctccagttggccagcgtgatcagcatgatgtccagcacacaggagacaatcaatatgcattaaaggaatgaatgaggacttggaaggccttatgtcccctggagtcccaggggtttagcttgtggaacattttgaataggcagaagagatttagatgaacttgaatgatgaacagccaattagtaactcaggccaaagacattcagaccgagctctctgttttccttcccaagcaggtgcttgggggcccagattatctgaattgttcctgccatcaccactgcattttacccatgtagatacaggacccgtctttatctggaaagtaggctgggtcagaggagcataggtgctgtcagctgggcccttgggatttgccaagctggggcacagctgcttgtcagcttcctgttttgtccctttctagtggaatgaaggaaacccactgaatggctattttccactgacatttacagcaatgtgataggccttggattaatgaggtcaaactgcagtgtgaaatctgcctgataacttgaagcttggccaacgggaagacatcgcttgttttctttggaccgtttgatgtccctggatggctttaggcaggaaagcaggggtctcaattctgtacgaaagaggagggtgttttacttcctggaattatagaggccagaggtgtctctttttcaatttattgggaaggtttattttaatatggacttagaaataaataacttattaaagtgaaggttcacctggagccttaggctggctgctaagtgtgagtctgggctgttgaagggactgtgctgttcttctgggtctctgtaggagtttgaaggagaagactggccccaaagggtgtttgaacaggttagatgtgcccattggttagaacttacttggatagggagaagggatctagggcgtatccacaaacttgcatatggatcccctttggtttcctgctaaaatgcagaaactgactcagtagggctgggtatggagttttctgcatttctaccaagctcccagggggtgtcaagctgctagtctgtgaactgcactttgagaagcaagggtatgggagaccccaagtctacaggtgagggttccctggtgcaaaccgcttaagcatgaaagcaaatgcagcctgttgtgcctgttcacacagccatctgctgtgctggctggcttgcggagtcacagatgttcactgtgccccttctctgtgtgcccaggcctgggaccagacttgacaaagaggatgcttggtctcaaggagcaactcagacagccagaatgtcagctagaatgatgagctttgagtactttcaaaaacatgtatcgaggtacatggtgttcctgggtcatctggtcacctgggacttgtgagaagtacagatgcctgggccttagcccagtccacctgtgttagaatcagccaatatagggccctgaaagtctgtattttctcaaagtgtgccaggtgattctgattcacagccagactgatggaagggaaggtgggaggaagaactgccagtacatgcaggttaattgctcagcaggacctatgtaaggttgtagagttgtgtattgctgatgggcacagtggcactcggctaaaggagaggctgaaatctagcctgtggatccacttgccaagctctgcaccctgcagggttgcatctgcttagagggacgggcacctttttcttaatattcatcataatcacttggtacttattatgagccaggtgctgtctacttaactcctttagtcctcctaacaactctaaggggtgacatcatcatcatcatcattattattattattattattattattattattattttgagacacagtctcactctgtcgtccaggctggagggcagtggtgccatctcggctcacggcaacttctgcttcccgggttcaagtgattctcctgcctcagcctcctgagtagctgagattacaggcacccgccaccactcctggctacattttgtatttttagtagagaaggggtttcaccatgttggccaggctggtctcaaactcctgacctcaagtgatccacccggctcggcctcccagggtgttgggattacaggcatgagccactgtgtctggccaggtgtgactttagtgctactctgattttactgttcaggaaagtgaagcagagaggttcaatgtcttactcaaggtcacacagccagtaaatggaaaagtcaggattccatttcaggacatccggcttcaaagtccttgtactgaatcattacactctctggccctttctttgcataaaaatgctgtcttctctttatggggctatccctactctgagggagtaccttttttcttgtccttccttcagaggggggaaggctagcaatgaccttggctggctttagagtcaggtacgggtttgattcctacctccagcacctactgcaaccttgagtaagttacatgtgtgtatttgctgagccacaatttccccatatgtaaaacaggaataataatagtataatataaattgatatgattaggcatttagcctctgcttggcaggtaggaggtacctgatacatgccaactattcttatggcattattatcattagagttagtccctaggagtattcaggagctagggaaataggtgagcaaagcactgtgtcattatgtccccaggagctgggtcattcattttgttcactaggttacttatggccattacttacctgggcatccctagtctcctccgcttcttggccccagagtctgtgccagcctggagagttctcagaatgtcttagttcagactcttagtcagaactgcctttgtttcctcacatccaagaacaagtaaaacatacaaattttgacacttattctctttaggtctcttgactctttttggtgactttctctgtctcctgttttctttctggaactattgctgtcgttggctatcccatggactggatagagaggaaatgttgccttataaacattgccaattaccttataaaaatatagggaagattttcaccaaaatgtcattcattttttttcttttatatataaacttaagcttttgttttcctatggctgtatgtcatgctttttaattacacaaagtatataagtgtatcataagtaaactttccccatcttctcagccactcatcccttttccccggaataaatctataaatgttttatgtatttttccataaatttcatatgcatatataaacccatattcatttacatgtttatgggtttatatatgcatatgaaatttatggaaaaatacataaacccatattcatttacatgtttatccatttttctttttaacacaactatacaaaactctcctgagatcttctttttcagctaatttatctgagcacatgccaacacacagatatacctggatctttaaggctatctgatagtccagtgataaaaatgtaccatcatttgttttctagtttcttgatgatggctaagatagtttccagtttttttcctcctacaaatgtataatgttgcaacatccttgtttgaacagtgcatatatctttgtatactctacatactgatgattttattcataaggaaaattcctggcagtttcaactgtgatagacattgctaacctgttctccaaagaggctgaaccaatttctgtttcctcaacagtgtatgactgtttcccccatctattctccagcactgaggattaagtaactttcatttttgtcagtctgacagatataaagcagaacatttctgcataaggttctacagtaatttttagattttatgaccctttggattatgcctacataatgatgatcaaatattcagaaactacattgtacctggccttaggcttggaattggatacaaaattaaatgaaaccagcttttgccctcaggttgatcccatctcctggagttggcagacaaatgaacaaataaaatgagagcaaaactgtatggttcacattgtgctagagaaatgcataagcttagctaacttttgtttgataaactctatattcattaatatcacaaatgaattcataaaataccgtatgcattatgtcccagggtgtgaggaggcttgaaattctcaaaagaaaacaacttgattagaagaaaaaaaaaaaaaaaaaaa

SEQ ID NO: 58202 - DNA, 6088 bp, Homo Sapiens
aacaagatgtcccccagcggcggagctccccaaaccaccccgactctgaggagtcgtccaaaagatcttcctgtgagaaggaagactgatgtgatcagtgacacgttcccaggtaaaatcagagatggctacagatccagcgttcttgacattgacgccctgatggcagagtaccaggagctgtcgctgaaagtccctggggaggctcaggagaggaggagtcccaccgtggagcccagtacgttgcctcgggagaggcctgttcagctgggcggggtggagcagagaaggaggagcctgaaggagatgcccgataccgggggtctctggaaaccggccagttctgccgaaataaatcacagtttcactcctggcttaggcaagcagctggcagagaccttggagacagccatgggcaccaaatctagccctcccttctgggctctgccaccctcggctccttctgaaaggtatccagggggctctcctatacctgcggatcccaggaaaaaaacggggtttgctgaggatgacagaaaggcctttgccagtaaacatcatgttgcaaagtgtcagaattacctggctgagtcaaagccctctggtcgggaggatccaggcagtggggtcagggtgtcacccaaatcgccccccactgaccagaagaaagggaccccaaggaaatccaccgggcggggagaggaggacagtgtggcccagtggggtgaccacccacgtgactgtggacgggtgccgctggatatcaagagggcctactcagagaaggggccccctgccaacatccgagagggcctgtccatcatgcatgaagccagagagaggaggcgagagcagcccaaagggaggcccagccttactggagagaatttggaggccaaaatgggaccctgttggtgggagtcagggactggagacagtcacaaggtgctgccacgggacctggagaaggaggatgccccccaggagaaggagcgaccgctccagcaggtgtcccctgtggcctcggttccctggagaagccacagcttctgcaaagacaggaggagtgggccctttgtggaccagctgaagcagtgtttctcccggcagcccactgaacccaaggacactgacaccctcgtgcacgaagccggcagccagtatgggacgtggacagagcagtgccagagtggggagagcttggccactgagtccccagatagcagtgccacatcgacaaggaaacagccccccagcagccgtttgtcttctctgtcctcccaaacggagcccacctcggcaggggaccagtatgactgctccagggaccagcggagcaccagcgtggaccactccagcactgacctggaatccaccgatgggatggaggggccgcctccaccggacgcctgccctgaaaagagagtagatgacttctccttcattgatgtaagtcagtggccaggagcatttcttcttaaatggaaattccagcctctctctgtgaattgccacttcaggtgtaggatctgtgtgccagggacccttggagtgggtacggagggcactgtctttgaaatgggactcacttatgcatgtatcttggacctgccatacacctgctgtgtgtcttggggcaaatgtcttcacctctctgagcctcagcttccttatccacttgtaaccagcatcatcagctccacagcctcaaatacaattgcgtgcattcaaattaaaactgatctaagcccttacctgctaggtaagcagggagtctgaccacttacccctgggaagtcaccctgaggtttatagttgcaagcatgaagaggctggagtttgctcagaatgattctgctgaacgttctcactaaggtcttgcttggtacaacagtgtccctggtatcaggggatccgactgtctctgtagtggctcttccaggacagaaagtcccctcaggcatgggcacctttcatggaggtcccaggggacagtccctagcactcagctctttcaggtcccaagcacagccaggatgtcagctgccccagcatagcaggtcaaacggtctcctgctctagcatcttccagaccagaacttatcctcctttcccctgggagccccacctccaggggtcaggcaggtcttccttttcaacccttgaaacccaggggtgatgtcattattctcctcgcgtaacaatagggctacctgcccactttctgggggatggaacatctgcaaaatgtgaaagggaccctctctcctggcagtaaagcctcccacctacatacttgggcatggctacccacatttccccagaggaggaacaccgctgctttagaaaaagggcttcctttagggcttcaaagaggattctccttcagtatatggccaaggtctctcgctggcacctctagatcagggcggagacaaagaaagacacaagttgagtcttgattggggaaccccattatataaccatggccatgcccacctccctgggtgtcatcaggatttagttaggtgatatattcagttattcactcaacagacatgtattgagatcttgctgtgtgccttacatgccagcatcatgtcactgcatcatgaactttcctgctagaacgctaagtggtcccttcttgatgtccattataaacaacaatcagtgagtgttgaccactggcccaggcacatgttaataaccccagaggcaaaactgcctgcgctttttgcaaattagcaaatcagagtggccatggagtgactctaaatgctggtgtcccgaagcataggtctaacgcttactgaaattatactgcggtttatgtgtgatgcccaccacgatttgggtctcctgtggggatactgaggtttatgtatggtgccaaccatgatttaggtctcctgtggggacagtttggaggccaaatggggaggcggaggcggagcactaaggaatccagtctctgtaccaggctgaggatgtaagggtggcaccatcttcccctccaagccagcccctctgtcagtgtgattctgtcctgctctcttggagtctgaaaacctggctctgttaagtggccggagaagcaagcctgcctctaggtgcagcaggcactttctgatttccgtctttccccctctttcactggtcccgtgcaagtctcctcacaagataccactgtggctggtttgggaagtagctatgatcagctccttccaccaccccattgggacttttgttacttaccattgttgggaaatgattcattgaaattagcctgtcatcactgacttagaaggccttgggtgatggaatttctccaaagtggacctaggcggaagaaaccaacatttcatgtaagaacgtgagcttgccggaaagagctcttggctgtgagccgtggtcaggctctgtctgaaacaagggctttccacacctgagcacagggagttctctcagccactgtaggaaggaggcactctgtttatctcctttttataaatagggacacccaagctcagagaagtgaagctcattgcccaaggtcacataaccaggattcaaacccagcagggtttgaaccccagctctgagcacttcactgctgtctcccgggagaattctgagccaggcacttcccatctccttactggggcccacccagatggtctgtgctccccaccctttcactgggggggccctcaccaaccccccacctgtcgcagctcagagtgtgagtcttcagggatgcctgaaaatggactcctgatgtttagtaagctgccccctcccttcccacctgcaccctagattatgtgagtaatggaggaattccacggagaacgtctcaacccggggactctgtgtgaatacagttgacagaaggatttagttagatgttgaatccattattcattcaacaaacaaacattaattgagctcctgctgtgtactgatcattgctgtagattacatgcttgtgtggtggatgtcactgggagggaaaaggcatttgtattatgtgcctactgggtgccaggaagccaggcactgtactagggcactcaaggttcattgttccacctgacttttgtcatcagcctatggggtatgttttatggggaaatttaggctttgggtgttaggttactattaaaatgtggaagccctggcctaggtaccacctaaatagcctctcatctgtcaacgaagctgtgtaccgccaactgtgttgtggtaccctccattgatggttcccttgatttttttcctcttcctccctgctgctcccaaagcaaacctcagtcctcgactcaagtgccctcaagacccgggtgcagctcagcaagagaagccgccgccgggcccccatctcccactccctccggcgcagccgatttagtgagtccgagagcagatcacctttggaggatgagactgacaacacgtggatgttcaaagactcaacggaggagaaatcacccaggaaggaagagtcggatgaggaggagacggcatccaaagctgagaggacccccgtcagccatcctcagaggatgcctgcgtttccaggcatggatccggcagtgctaaaggctcagctgcacaagaggccagaggtggacagtcctggcgagacccccagctgggcaccccaacccaagagccccaagtcccccttccagcctggggtgctgggcagtcgcgtgctgccttccagcatggacaaggatgagaggtgaggggtcttggggaatgggggtccctctccttccaaactcaggctatacttctagagaggtgctcgcataggttttagagcagaatagaagagagttacaactttttaattttctctagcagcagaagctttgttcatgagaattctcaatactcagatacctaaaaagtacaacagaggccggggaaggaggccaggaatcaggccagctggcctctcctcttccccgcccactgccacctgctacatggaacgccagggcaccattgctggagaactactgatctagtttagccctctccagaccgatggggaaactgaggcattctccctcctcttcccctttggggaagtatctttattatcagagatctggaggacctgggaaggtggatcaaagggcacggccaggttgaatgagatcggtttcactcccttcgtggaacagctatcccgatcctgggctgttctgtgtagagacgagcacaaagcagcttctgccccccaagaggctctcaggctctcaggctctcagaggggtgtttcagcagctggaggtggaggttaagaacaggggatctaaggtcacacagccagggtttaattccaccattgctgcttaagagctgcatgatgtgggaaaaggtacttgacctcctgaacctcagtttcctcaactgtaaagtgggttttctaacctcctaaccttccgaggtggtcatgaggatgaaacgagtgtgtctaaagccctgtgcctgagccctgggatgtagaagtactcaatgaagcagagtggaaatcttatcatgagcactgttaatccatgaaagttagggattgttcctgatgctagagttgtaatgatagtaagtgctggctggatcagagcaagagtgggtaagctatggcccacaggctaaatccagcccacatcagtttttgtaagtaagctttattggaacacagccacatgcattcatttatgtattgtccataactgctttagtgctaccactgcagagttaagaagtagcacagatgtcccacagcccacagaatcaggaatattttactctctggccctttctctgacccctgtgatggagggaggcaggcgaagggctcataatgcacacttgaggatgggcggcagaaaagacttccagctgggtgcagtggctcacgtctatagtcccaggactttggaaggcagaggtgagaggatcacttgaggccaggggttggagtgcagtgagctatgattgcaccattgcactccagcctggactaaagaatgagaccttgtcacgaaaaataaaaaaaaaaaaaaaaaaa

SEQ ID NO: 58203 - DNA, 5757 bp, Homo Sapiens
tacggctgcgagaagacgacagaagggggagctgagacaaagcacagcttctccctggacccggaaagagggactcaggcgcctggggctggggcctggctccagacctgctgctgctgcctggcctggttcggggatgcctagcctaacaaggcagcctgggctgggaatcgcttaggcctcaggttgatgaagctgggagaagggttgagagggcaccagacctaagatggtggccagagccatttaatcatgtggttgtaaaattgtcagtaacttctttgtatggctagttgatctgatctctcatgtaggactcagtcccccagttggatcttggaaggtagccatttatttgaaacagacagcctggtagagtgaaaagagctttgtgttttaccccctcagatagtaagcaaagaaaatggaaaaagcagcgctgtctggggagacatcctgatgcattgctggtgacagagtgaagaggtgacacatttggaacataatgtggccatctgtatgaagaaccatagttcatccagtcatcccaaccctaggactctccagagaaaaccgtttaaaataggaggaaagttatttgcatgaatatgttcataagaacattatgtataatagaggaaatttggaagaaacctataggttcttccacagggaaattgttaaggaaatgatggtagattctccgcaagaatggctcccattaaaaattgaattaggaagactctaagataatatggtattaagaaaaaaactccatgattaaaaatgagcatgggccaggtgtggtggctcacgcctgtaatcccagcactttgggaggccgaggcgggtggatcacttgagctcattatctgatgccctgaattggctttttctcatgcacattaggttaaggtcagtagttactcacgtaagttacccattgcatgtgtttccagtgacagaaaaggatttagggatggatcgttgaggtgactgctatgcatagaaatgcctagaaggaggcgttggtttaagctgtagaaggaggcaggtgccaagtgctcccagtttggggtttgagctcccacattctgtctgcacagcagcaggcaagtcccgtggcctccaggctctgcatctgtgatgtaagatcgtaaacctgtcctgcctaccttgtttgagcatcagatgagataaggtacgtgataacactttgtgaatcacttaaaaacactatgtctatgtgaggttgatattattgctatccaataaatgcaaacgtgtaggaaattataaaatgattcaactgttccattcctgtttttgaaactttctgaagagagatggatatgtttccctgaggtggggagctagggttgtgcctgtgttcatccaggaaaatgggatgaaaagcccaagatacatctgcgacatcatcttcagaatgtgaaattacagtgggtttggaatctgggccttctctctgcctgctccctgcctctccttccctacccacagtctccagctctgactcctggcctcccagggtcctctcccagcagcctggaaggaagggacatcctcattccagggcccgggccatgaggaaggaagcagtgggcagggatgcaggctgcaggtgtgggcagctccaggtgcccactctaggcttcaggatgagtggctcccttcctgcagtgggtgcccatcctggcaggtacagtcaccagagaggcccgcctgcttcagctgcataccatggggtttttcctgagactaaagagggtcctgctccttatatccattgaccagtgagtgatgaggaagactgaatgctgacggacgggaggaaggaagtcaggagaaagggagaagggctggccaggaaggaggagagaggaaatgacagaggagagggagagatcaggagccccatgcctgccagccagggaaggccctgctgttgcactcttcagaaccccaacttgggacattttgaatagatgttaggagtgtgagtggaatctaatgagtgggacagacctcccaagtgagcattgaatatgagggcgggtggggcatggtagctcatgcctataaccccagcactttgggaggccaaggtaggaggatcatttgagcccaggagtttgagacctgcctgggcaacatgggagacactttctctacaaaaaattaaaaattaactgggcatggtggcacgtgcctgtggtcccagctactcgggaggttgaggtgggaggatcgcttgagtcctggaaatcaaggctgcggtcagccagattgcaccacagcattccggcttgggtgacagaaccagaccctgtctcaaaaaaataaataaaagataaaaaataaagaaaatgagggtggaggaagaagagccagcggaagattcttctgagacatgggaagtaaatttgcaagattgctgtctgggagctggacagacaggaagggaacagaactgggatgtggcagggacaggttccaggcactggcaggatgggggccagtgtgcagtgggccaagagggaatgggagcgagaaggtggggcgtcagcaacattcagctccctccatagctcgatgagaagagaggggtggggacaggcggtagctggagggtccttcaggatcattttatccgtatccctttcgtatcttttagtgagtttttgttttccctaactggattgttggcattttaagggcacagtttatatcttctacctctttgtttcctccacagttggccgatcaccagatcacttaaaggaggttgtttgttttataagcgttttaccagatcttggcttaacacttcccccagagttagtcataatcattctagcagggcttctagatgctgaacaatgaccgatggtgccacttgatttatatgaagatactggtttagttttaaaagcaaacttacattgaacaaagtgtaggaaagagaaaggagagggctactcaagtgcctgaaggtctgagcagtgaagaacatgtttccatatgcctgccacccttaggctaaggacacggttttcctatctgtttattgaattgggtcacttgctttagttataatatatgaagggataagactgaatttcacttctcaattaactagccctcttgctctcttttgatcacacgttctggggtcagattccagctctgccagtcagtggctgcactggccaaggccacgtggttgaccaccatccagagttctgccaagagccttacctgccagaggcacgggaggtgtggctgttgcgcagcttctgtggcccaggccctctgcctggcacattttaagtaatgtgagcgggttacttaatcttactgtctgttcagctgaaaactagggccaaccctggctcagagctcagggggccgttgcgaggattaaatgagagaatccatggaagatgtttagagtcgtaccagacacataggaagtgctgaataaatcagaatggtttttactatgactctcacctttcaatgtttgtgacttaaacttatgttacagttagtcatttcactggcgtgtgctaaccaaaggtggcctggcccctccgcatccattaggagggcttgagtttaaaatccaggccctgtgagtctgcagggaggaccgacgggagagctgggtactcctgggacttcagtgtccagtggatgctggggttctcaggttggtatattgagtcacatagttccatgactcccttggaggaagaggctaaagttgtctagaggcaggtgtgatgtttggtctgtcctgtgtgcactgagcaccttctgtataccagtccccctgcttgcttcttccagacagaagaaaacacagatggcaattggtcatatttgaacagtgcctcttatagcttacaaataccatcttattgaacactcatgaaaaatgctgggatgtatgttatttttactgtttcaaagatgaaaaaactcaggcacagacattctaaatagttccagctcttaggaaaatgcttctttagcattgcaggagaaacagtatatttgtacaaggcaagtagttcaccctgtaaggcggcacgtgctttggaggcacctaaatactacacagtgttttatgcatgggcgtttttcttacaaaggaacatagctttatcttcctgggggtgtttatcaaaccacatctatgtagcagatgctcttcaagcatttcccatattccctcgtttacaacaccctggaaccctgagttaattattagtcccatttcatggctgaggaatctgaagctctgagagtttgaacttcttgtctaaagtcacatggtgaggaagtggtagaactgacctggaccccaggtatctggctctggtctttccaatagtgcctcttcagtgggtatcccttaaattctcaggggcaggtgctttctcctccttttatgccctttttttcagagcaaaaccacgttatcctaactgccaagcacaacccacaaaggctcttatctctccttcaaaaaaagccattccctgcctggttgatgaggtcacctggcattttgcagggcattttgcagggtagatgccagctcgggaaagccacatagataagccagtggatggcttgtgttactgcctccctgatggtttgcttttaattcaagtcgattcatttatctgagatgaaaaagggagaggctgattcacacacattgaaaagcagggaatggtgctggagaatgaggccgtgactatttggaataagatcctggagatgggcagtgctgatagagtaaatatccagggagcaggggaaggtgtgtgcactgacaacaggagttttagcatctgcccctccttgcttcaaggggctggcgggtacccgaggcggggtcggagggctgagtgatggctcccatcctccctcttccctcctgctccacgggtgtaaccttgaggtgggattggagggcttggtgacctctctcctccctcatgctccatgggtataaccccaaggtgggatcacaggctgagtgaaggctcctcatcctccctcctccctcctattccacgtgtgtaatctcaagatgggatcagagggcatggtggagggttacacatcctctcccctccctcctgctccacatgcgtaacccccagctgacttacagactgtggtacctgctcaactgcttcaattccagaactggaactgcagggaagctgtttctgacatccctggttttaattacaaagggccccttgagaccttgtcagaaatactgccagcctagccctttaaaaactcatgatattgggttctctatcagtgtcgctccctggctgtaatattgtactataattaggcaagatgtttcctttgggggaaacggggtgaagggtatgaaggttctctctgtgtcatttcttaaaactccatgtgagtctatagtgagttttaaaaagaaaaagttccagcctgggcagcatagcgagacctattgtctctacacataataataataataaaattagacagtgtggtggcgcacgcctgtggtcctagctatttgggaggatgaggtgggaggattgcttgagcccaggagatcaggactgcagtgagctgtgattgcactactgcactccagcctgggtgccagagcgagacgccttctcaacaaaagaaaaaggaaaaaaaaaaaaaaaaaaaaaa

SEQ ID NO: 58204 - DNA, 5360 bp, Homo Sapiens
ctagaattgccttttgtttcatctctcaacatggttataatacaaattaaaaatagtaggtagtcagtattttcattttttataactttgtaaatgttacagtgattcactaggtcctcccatctatagtactttgttatcctggagttgtcaattgctacctttttcccctattttctatatactttaatattttctaaatgcttcaacatgtttgttatggtcttaataatatattctgtatgcccacacatatttgcttcatttttttgtttgtttgtttttggagttctgtcccatagaccatttctctgtttcaaatttggggtgaattctgattctttgtggtttaagcatgatcactcgctttctaaaagtaagtctagagaaatgggattggtcgatgtgggtatcagtttacatgtttttacttaatcttgctgtttgtagctctcaatcatctctcctttgtactgtgacatacaatttgactgatttttctgaacctgagtcatttaagatctccaaagactaaatttcctatacacccacagaggggaggcaattgtctgaatgtgctgggtctggaaagcacatgggggtttaattgttctgtacatagacttgtggtttcaataatgccatctatttttcaatccctgcctcaccatgaaacttatgtgataccatgctaatttttttttaatcctccgaggagaatttatcacgcttctcagtcttctccactgtaggcagtttatgtttcatttcctctgcactcttgccatcacttctttctttttcacaaattatttgaactcttatcccccattatgtctttgttattagcaagaatctaaccaaacttcattttcgtaagtgcttttcaaaattcacatattagctttggactgaatgaaaggatggttattttcaggtgcattaatcaaaaacactcttcaggcagtaaaagttaccctttcttacctcttttgaaggaatacattggacattcctcatatgactttggtgaaggatatagggtctttgggacttgaaaaacttaatttttatgatttgttgtgataatcaatggtgatgagtttcactgagtaatggtagatgaggttgttttagaccatctgccttgtgatgttttgctggattccaaaacagaaataaaaccaaccttttgagggcatcacagagtactaaagcagtgaggaattttgagtaaagaaggatagtcatagagtgagcttgttatttttgatggattttgtcctttaggcatctccagaactgactgctgcgtagttgaggaactaagaaaatttttgcacaaagtttgagccctagtaaaacatcttagactgtgagttggaattctaaatggttagaatgtagcattaactgagaaccgaaagttaagacaggcttcctagtttctgaattatatagttttaagttatctcagaatttattggattaaggcgacctgagactgtgactctagtctccctgcctgccagagcaaatgtaaattctctcttagaagatagtattatctggaacctttcctcaatttttcatacacaatgtctagtactcaggtcagtcataccagaaaataagatgtgtgtgaaaactaacacaaaaaaatggacaatagaaaacagcacagggaaactggaatacttgtctgccataataataattaatatgttcaaggaattaaaagcaagattgcgagtctgaagaaaactaaaaactgtaaagaacaaaatgtaaatttcagaatggaaaaatataaatgaaactaagaagtcagtggataaatttagcagcattattagacacaactgaagagataattagccaactggtaaattaatctggagaatatttttcagactaaagctatgacataaagatgggagcatcaaagagatactttggatatggtgagtagtactaacagtgtatttgtagttccagagggagagtaaaaggaaatagggcaaaagcatgtttgaagagattactcacaatattccaaacttgagaaagatcaagccatagattcaggaagcaataggaatcaaatagtataaacataaagaatactgcaccaaagtacatcataataaaacaaataactatagacaaagagaaatcctaaaagttgcaaggtggaaaaagatacacgtataaaggagcaaaaacaagactaatagctgactttgatacctttaaacatcaagtcacacataagcagaaataatgtctttaaagtgctagaaataaataactggccatcttgaattttatacctagcagaagtctttaaaaatgaagaaaaactagctgaaataattcttcaccagcacacccacaccaaaggaagttctaagtatccaggaacaaggaaaattctctatctacaatgggagctcagagaatagaagtgggattgaaattcttctaacctgccaagattctctttcctctttaaattcctcaaaagaatagtccatggtttgtctcccctacttaacagtagtcccccttatctttggtttcactttctgctgtttcagttacctgctgttaattgtggctgaaaatattacagtactgagagagagaaggagagggagagagggagaacacattcatataacttttattacagtatgttttctttacaattgacctattttattattcgttattgttgctaatctcatactgtgcccaatttataaatttagccattataggcatgcaaggaaaaaaaacataatatatatggagttcagtaatatctgtggtttccggtattcagaggagattttggaatgtatcctttttggataagagggtgctactctgtaccccattttcccattatttaatgcctctgttcttcctctaccactccactgcaaacatgactttgcagttgccaaatccaaaggttatttctctgtccttaatttattggaagaatgtggcaacctttcatgatattgctaatcttgtcctccttgaaatgtgccagctattttttgatgtacagcagaatcttttgtggaactttgtatctttattgagagtcccctgacacagctattttttaaagctccgcagtttattagaatacacaagtatgtttgaaagcccttgttttctccactcgtttttcttctgtgatttcccttagtattcctttctctttttcaaaactctttttcttttttcctgtgatttttaaatggtgctttctccccaaggttctgatcttggccaactgttaatgtattcatatcccttctggtttattacttctactcttactgttttaaaaagcagtcacaagactgtaatccctacaagggcagagactaccttcttagtgtctggcatatagtagatgctccataaatatttgttaaatgaatgaatagatgatttattttatgtgcttatattgttgaataaatctttctagatcacaagataaaatttttttttacagtttctgttaccagctttatggttttacctttcatatttaggttgttaattgatctatgtaatctggctctatttctttatatgtagttttctcaatacccaactgttgatcaaaaccttgtttcctcattgatttgtggtgccacctttaccttctgtcaagttggctgactcaccttttctaagatttgaaacattatcacttcctgtatagtaattttcaaactttataaactgtgacccaagaaaggaatatactgtatattataaaacattttacacatacacaagtgtgtaaaatatctacaatgaaaattttgcaagaaaatactctgatgtatttactgagtatgatacattgtgatattttccattgtattttatctcattttaaagaaatgttcagtatgatgatagtaaatggttgcaaactacagtttaaaaaacatactccaggaagcctttccatgggcatcctgcatatgctccattagattcttgtgtaattattatcactgcatcttgaagtcacgacatttctattacatgtctgtctcctttctaaattgtgtacttccttgagcattgagataatatgtaatttctttgtgtctctattacctaggatctgatgagtaaatttatttgtactccatttttctagtattaatgatacatctagataattcatggtaaacatagcaggtctaaaaagttttggacttgacatttgcatactctttattttgaggaaactgcttaagtgcatataaaaagagctattaataatgagtagtatatttaaaaagttgtccaaatataatcttgtgcactatcaagtatcaagaatggtatgtcaaataaaagaaacttgactttttctcagaagtatgtcctccttgtgccagttgcaatgattctgagtataagtagtacacagttgtaaaaaataaacctccaagactagtcatttttacattctgctaatggaattttccctcaggttatgttaaattgttgttctttttcagtcattatttaatcttttggaatttagaagattagttctgaattacaagcctccatcaaatgctcaagatttaccccgaaaccaaaaggtaaaattcaaaagatttttttaagcagtatatatactctatatgttctcttatatgtgattgatttttgggcatttacttggctcatcaaatctgaaactgtcaatttgaatgtcaattcattaatcttagttaccatagcaagttcttatcctttgttaatatattataaatacgacttttttcctttacctgtcacagtaatatgccaatttttggtgtcgctttagtaatttttttgggggggactgtcaaatttcagtaaactttataggctatagtttacaatttaaggtctttcctcagttgtctcctaaaaaattttgtggaaatcgaaatttcttttcaattgatcgtcttgtgcagccctttaaaaaatgcgttttgcattcatgtctttgcagtacaaatctgtatctttcattttgggagtgactgtcatagatgggtaatataaagtgacaacacacacaccagggccagattgcgtgggttctagctagggacctagagctggttacttgatttctctctgttccatttactatctgtaaatcatatataataatagtaattatttcatagagttgctgtgagcattaaatgaggtaaaacatgtaaggggcttaaaagtgcttggtacatagtaagtactaggtgtcagctattgtcagttaaacaataaaaaaaaaaaaaaaaaaa

SEQ ID NO: 58205 - DNA, 5231 bp, Homo Sapiens
tacggctgcgagaagacgacagaaggggtggaaagcaggcagatcgttgttgagggtgtagtatccaccatagacttacatggttctactgggtcagtcatggcctctgtggtctttcctcaagaagggaatctggaattggaaaggaggggggtggggctgaaacaattcagtggttgtaggaacttggagttgagttgtagccatgtgtagaaaaggaaacacccatacaactctatctaaacaggagaagtaaacttacagctgccctcaaatctgcacaacttgctggcactaggagcctcttctattttaatttgagacagggattataggattccattgagtaagctttgaaatgaggacactaagatcagggggccagccctgagatcagatttccttatttatctacattgcttagtgcagtcagtgattcagaaatggtccttccctttgccaagatgaaagtggcagtgagtttttcatggccatcattatgaggtgacgtctttactcctttttcagaactgatagattgaaagaccgacacattcctaatgatttaaatacaaacattccgtgaatgtttacccagccttcaattagataagttagattttacaccatctgtttctgtcgagtagagctgcttagctatttagagcaatgatttggtcatcaaattgctacagaaatgatgttgaattccgccacatgtgacaacatggatgaacctggaagacattgggctacatgagaaaaagccagtcacagaaggacagatactgccttcttctgcttgtatgaggtgtaatgcccaaccttgtttttactaaccctgtttttagactctccctttcctttaatcacctagccttgtttgcacctgagttgactctcctttggctaagagagccagacagactccatcttggttctttcactggcagccccttcctcaaggacttaacttgtgcaagctgactcccagcacatccaagaatgcaattaactgatcagctactgtggcgaactatatccgcagttcccaggaattcgtccgattgataaagcccaaagccccgcgtctatcaccttgttaatagtcttaaagcccctgcacctggaactgtttactttcctgtatccatttatccttttaacttttttgcctactttacttctgtaaaattgttttaactagaccctgcctcccctttctaaaccaaagtataaaagaaaatctagcccctttttcagggccgagagaactgagcgttagctctctcttggccgccggctaaatatacggacttttaattcgtctcaaagtgtggcgttttctctaactcgctcaagcacaacagaggtatctacaatagtcagctaaaggaaagagagaccgtttgttggttgccaggggctgaagggagaaggagatggggagtgggctgcagtttagtgggtatgaagtttcaggtacgttagatgaatgagttctagagatcggctctacatccacgtgcctatactcaaccatacggtattatgcacttacagttatttcagagagtagatctcaagtcttcttaatgcagtaaattataataataaagaaatgctgagtaacacttataacctggagacttttataaacgtaaggattaagagctaccaaccaggagagatccatattctgtctctctaatgtcagtgtctgcatgtgagaaatgtgttttaggagtgtgcctgtgtagtacaaattggagtaattatcgttcctcctttcttctgctttggatggaggtcaggaagcctatcccatctcttactctttctagtatcaccattttactgttgctctaggaacccagagcccggttcctccccaaattcttgaagtgggatggttaggaaagtccatattcaggtagtgccctgaaatatggccaaatatttgaattttttgtattcaaagtttgtaaaattatgtttgcagaggttttaagttggttggtggagcaagggtgaccagaagaggacattttaaaccctactttctagagtgacccagatcagaagtaacagggagtggcaagagtatcaagcacagaccaagaactgagagaaagcaaggaagagaacggctgcccaggacaaagcagcccagtggctgcgaggcatccgatgtcacagatcctggcaggccacacagaatccttgtatgagttttggggccaaacaggcctatatgtagatcccatcatgacttggatgacgttagaagttatacctctgtgagactgtcttctcagcatttgaaatgataataataccaacctcacagattgttgtaaggtttaaatgagatcaacattcaaagaattgagcacaaggccgggtgcggtggctcatgcctgtcatcccagcactttgggaggctggggtgggagaatcatttgagcccaggagttcaagaacagcctggacaacaaagggagatgctatcgctacaaaaaaaaataaaattatgaattgggagggcatggtggcacgcatctgtggtcccggctacccaggtttggtcaatctttctgactcagcctgctgagtagctgggaccacaggtgcatgccacgatgccctgctaatttataatttaaaaaaaattttttatctccatcttctagagtccagaaatgtgagaacatagatttctatttaaggcccatagtctgtgatactttgttatgacagctgtagcaaatacaggtattatcacgaagacttggaatgcgatgaacacctgatctcatagcccagcaggtaagggaggaaaatcagggcagcctcgagtctactgtgctggaagggagatatgtttggatgttgcactcagtaggcttcccttaacacacagtcactagtttttgttatattgttaatagtgttatgcagaagcttttgatggctgatctagaggccaaagcacagaaagcaaatcttttgggtcataacctacccttaagagacttcccatatcttggtttatatgctttaacttagtattgttcatttttgtgtttgatattgtgttattcttttttttttttttttttttttgagacatagtctggctttgttgcccaggctggagtgcagtggcactatctcagctcactgcagcctccgcctcctgggctcaagggatcctcccacctcagcctcctgactagctggcatcacaggtgtgcgccaccacacccagctaattgtggggttttgtttgtttgtttgttttagtagagacagagttttaccatgttgccggggctggtctcaaactcctgggctcaagcgatccagctgccttagcttcccaaagtgctgggattacagatgtgagccaccgcacccagtcacattgtgctattcttcaggaaaaggttgccagtaatttctgggccattttccatcgttctttgataatttctagcatagtttagctcagtatagctgtttagagatgtgttctgaggtagaggctggggaaatcatcagactccatagggcgttggcataggaccaatgcatgccaagccctgttagaatctggacagggcattgtgggttgcaggtgtgggtggggttgacaggaaaggagctctgggagacgtagggcaaaagtttaaaaatttactggtttagtttttttctcattctactaattcacccacattgtaatttatttgcatttttctgcttattcacgcttaaaaggctttccagcagtttattcctaacaacttggcatttcacgctgcagaaaattttagcgttactacatgctaattattcactatgcacttcttcccctagattgttaataaactgctagcactaaactttaggaaactcctactcctaacatgtcacagtttggtgatgaatttatcctccatatttgatgaacagaccttaataatgcgccaaattctattctaggtgcttttaccttctagtttaattctcaaaagagctcggtgagataaacattgagataatgttcagagaatctaaataacttgttcaacgtaaaacatcacacaggattcaaacctcagtgagggtcatggaaaagacacaagtaaatgaaaatacaggttgtgtgagatgctaagagacgaataatgtattgccatagtgtctgactagacaggaaaagctggtatttaaactgcaccctgaaggaagagaaagaaggagccaagcgtggagtcaggtgtggagcttttcagactgggcaaagacgctaaggtttggtgtgtttttgaaacaggagctcagtgtggccgcagcttagtgagcaaagggactagtgaccagaagtggtcttggaggacagagaggaagagccagatcatgcttgaccactgaggctgaagtgaggagattggactttattttactgtaaattgagtgcagagccttgggagggttcttagtgagatgatatcactgaattgcattttaaatgagatcatggttttcttattgcaaaatgaattttcagggaattgtgtggggatccattgaggtagtcgattgccttgccccgtgtttgtggttagtagactgttaggaatatcaggactggcttgtatgttaactgagaaagtacaaactgaaaaccgtgtgtttggaattcaagttttgcaccatcgaagacttattgctaacctttgcttctattttgaagctacttatctgtccttgacaaagcagttcccgcttatttactgatcagtttgttgttagaatgacttttgccttaggtcttcaaaagtcaagattttttcaccgagaatacatcacggtaggatttaagataattttatagccagagaaaccttcaagataaagtgcaaattttagtttaaacagtaaaattaaagcgccgctcagctgagtgccgtgatcaagatcacacatattgggaggattgggctggagtccaggtctcctaccacccagttcactgccagtgcagaggatcaagggagggtacaatgttagcttggttaagacacaagaaagcccagagtgacagaagcatcatgcacaagaggaaagacgtgtgaggtgagtttggagagaaaggcaggcgttttgagttatcaataaaatcacaatgacatataaggacaacaaaaaaaaaaaaaaaaaaa

SEQ ID NO: 58206 - DNA, 5074 bp, Homo Sapiens
tacggctgcgagaagacgacagaagggggaataattttaattgaagcctcctctttaagtagagaaagtaatttgaggaagttttggttgctttttaaattttggtgccttgtggtacctcaaaataatttattgtccatattgccacatttaataatatttctaaactatgaaggattaacttgctttagtttggacaagtgctatattttcttgtggcttgctaaaattattttattaaacactattctatattatctgcaaatttactgaaaggaaagtcattcttttcaagttctttggaaagaaagtaggaactaattattaggggtgctttttatgtgtcataacacatgtggtaacattggtcaagacttaatgatatcttcaagggaagttattcctgggatactaaaatgttgtctgtgtggtgaggaagttggtttttttcttcacaaatacaaatgagctcatgttttaatttaaataaacaactgatttctttgttaaggtgtaaaagtcattttaaaaaaagtttgtttaggtccagggttatgtttattttgcatattgtttggtttattatgaactttaccattttatagtataaaggatttaaaaccagggaatcgtgagatcacctacacagaaatagcatcattttggtttttaagagttttgtatgtgtctgtctcgtaaattgactacatctcatttttattcaaattattaattgaaaacaggaagcaattattcgccccagcactggtaaatgtgagatcttaagcagtagtttgagattacttttctcaccttcttcctaacaagcctcatgtttgcatttcaggttgacattgattgcagtcagaaggttgtagtttacgatcaaagctcccaagatgttgcctctctctcttcagactgttttctcactgtacttctgggtaaactggagaagagcttcaactctgttcacctgcttgcaggtaaggctcgtgatggaattaaaaggactcagaatcttgctgagctgtatgagtaagcatatttcactgtgaactcagtacaatagatcatcccaactttgctgtgtaaaatgatttatttatagcttttgattgatgtcaccgttctatttaacttgaatactatatcattcttccacataggtcagtgtatttttgacttggctcaagtgcctctttgcttgctattaactggtagtgccacatagattcgcacacccatatggatagctcaaagccagctgcttctgtctgcctttttccattcacctgtgatgtaagaacaccaaatgatgaacatctcagctcctgctagttcccacccctgtggcaagaaccagaccaatattacagtgtcaaactcttacttaacatttatagttggagcggactccagagataagccttatggtcacctttctgggcattataaacaatgaaatagggggagaatgtgtgcagaatgtttcttctggtaattaggggaattgttttaaaagttacttgtatatttttatttgttttataattaaaaaaaagtctcaacgtagaaatgctaagcaaccagatgatcttataaagtgtgtgggaaggaccaaatattctatatctctcctggaggacggcattgtaggagttaatcccatcaaattccaaagaaggctattcatcctttgcttctcgttttgcaaatgaaaatcctttcccttgccctgtgggctcatagagctgggaatatagtttgacaacacacagtaaccttaacataaagctgctgtgttgggcggattcagcttcagtgataggcaagagtgcttttaaacatttggtctaagaaaaacaaaacattaagattaattagttgtaggtgtgttaataattttaaactctgggcaggtttagataagatttccatgtctccagttctctctcacaagcttttcctcagttctctaagaacaaggatagttcatctttttcagattgtctatctgtacacctttcatttatgctgtgattccgtctgatctttcaattagtgttcttaagtgaagccagcttgtcttagaatgtagttttcagaagtctgtaactgagaattataatattagattctgtctctgttgatagacacattcttttactgggagtatgagtgtgttaaatgtaacagctattattagcatttcactaaactaattgggtgagtttaggaactcatttcatgtttcaggtggccactgtgtgagggactttaccttggaatcctgttaatgggatcagggtttttcttttctttttttttttttgagacagaattttgccctgtcgcccaggctagagtgcggtggtgtgaccttggcttgctgcaacctctgcttcccaggttcaagcgattctcctgcctcagcctcccaagtagctgggattctgagcacctgccaccacgcctggctaatttttgtattttagtagagaccgggtttcaccatgttggccagtctggtctcgaactttgacctcaggtgatctgcctgcctcggcctcccaaagtgctgggattacaggcatgagccaccacacccagccagagtctttcttaaagaagcaatatgccaagatgtgcttcgtgacagagtggttatcccaccatgttcttgtttgagttacttttaccctatggggagaccttactcaacatctcggtcaagtagacagccccccagaggagtgagctcacattgagtttctagcacaggtgctttagctacttgtaccctttactcctttaccaaagagcattcctttgttacctgggaaggttcttaatctatcctgtgtagccttgggaggggcattcactgggcaataaggaagaaacaggactgcctgattagctatgtcaactctagggacacgtggtgtgacacactgagtcagaacaccctgacatccctgtttcaaacaggaagtgtttcttaggcctaacggcaagtccatggaggcagcaccaggagccacattaaatgtattagtagcaccatatcttcatccatacctccagaatcctgtgtttctattagcttaggaggtgacttcagagtctgaattgcttgtttgggaatttctgagcagctggatttcttgtgacacctaagagagggttctagatgattagaagccttcccaatcatccaaaagcaattggggattctcttggttagtgaattttttcgtcagggtaggtagataattggggtaagtggataacagtattggagaaggtttggccatcaattcttgggaaactgttttattgcaaaggtccagctgctcagaggacaagccagggatgtgggacagaaggacatattgacaaaagtttcttaaatattttggttggggagaaataactgaaaagcaccctagtttctcacaggggctactgtaagttacaaggtcactggagacaattttcactacaaactgcccctgtgactttcaacagttggagattgttgtcagtctcgtttggacatggtaatagaaagacaaagtggtttcttggaataatttttccatcggtttagaactttcagccaccttgagaaaagaaagcatcagatatgtgagatggtttttatggtcattagctatggcagtgaggaattgtggccccacatctactcacactctcagggctaccttacccacggaagaatgactgtgaataaggagaacaagaggactcccaagaaattgatagcagtatcttaacgagctcttttccttcaaacaagaggagactgacacttacctggaggacctacttacatggtcatgaaaaatgaaggattactgaaggagaaggaagtgggatttggggaacctctacaggaatgcagtgggcttagttttttaatatggaccaggtcttgtttacctttgtgttcccgcaaggcctagcccttcttaagttttcagtaaatattttgatattagcttacctgaaggttttatattgtttatatttcctatgatttatcagtctagaatataagcatattaagcagtgatgaagtctgaaagtagagaaaacttcagattgtttcaaaataggtgatttggaaggtgtatttattctgataaagcaaatatatagctgcgatgggaaaatatctaatatgaaactttcttcatccatataagcagatgtgaagatggtattaaaatctgatgaaaatgctgctgtagtgaaacagtgctaattttctgtggtccttaaatactgatatttgataaagagctaacaaccctagaaatctagctccactcataggaatacgcaagtccttgaattcatgttaattgagaacagtcagaataattattgtatttttaaaaatgtaaatgtaaattgattgctctagtcattagtaaataacctactaaccaagtcaaactaagccatagcattgtttcactcccagtggattaaagggtttaatatcagtagcagctgggtgtggtggtgcacccctctatttccagctactcgggaagctgatgggggaggattgcttgagcccaggagttcgaggttacagtgagctgtgattgcaacactgcactacagtctgggtgacagagagcctgtctctaaaaaaacaaaacacaaaattatcagtagcaatctcatcttaaaaaaaaaacaaatttggatgctttagaaagttctccattactgcccggccatggtgacttacacctgtaatcccagaactttgggaggctgaggtgggtggatcacctgaggtcaggagttcgagaccagcctggccaacatggcaaaaccccatctctactaaaaatataaaaattagccgggcatggtggcatctgcctgtagtctcagctactcaggaggctgaggcaggagaattgcttgaacccgggaggcagaggttgcagtgagccaagatcgcatcactgcaccctggtgtaggcaactgagtgagactctgtctcaaaaaaaaaaaaaaaaaaaa

SEQ ID NO: 58207 - DNA, 4729 bp, Homo Sapiens
caagctttgagctttgagctcagaagacgtgggctagaattccactctagcacttgttagctttgtggccctggataagtggtttgcaattttcttttccctttcctcttccaaatgaccttctttcaaatatttgagccctatccttccagtcttctcctagcctccctgtgtgataagaccttcatttcctttatcactttggtcacatgcccagctctgcccatgcacatgcaatactcaaagatgcacaggattccccaggtgtggttctgggtcagggagtcatcagggctggcaagggctgggagaatggaccagaaagccatagagtgagatacagggggaagaagaacacagactggcacaccagatccccggccctcaccttcacggtcctttggccaagctgccccctggttccaatagttctgggactaaaccctggcttttgcccttgcgccaggagtagtggtgaatgtaatcattctggccacatcattgagggaactagatgggatcagggccagctttgcctcctgttcactttgtccagagctgacatcagagcctgctggagagtaggtgagcagcaatatgtgtccctttttacccatgtccagatgcagcatccatccttacgacctcattccctccccagctgagattcattctcagtcacacacagtcttttcagtctagaagcaaagactcttctactcattgtgtaggtcagaaagagaaatgcaaaggttttgagatctgatttctgacctgaagatccttattactagctatgtgtcttcagaaagtttaacctctcttagtttcagttccttcatctgtaaaaattgagacataagtagcccatacctcatagattgcaggaagaattaaatgatgtggtgtatacaaactcttagtctaagtgattgatgtgtgttggcttcttgggggaaggagaggtgacagtgaatgatttcttaccccactacctgtgagagcagagcaagacaggctgggcttgcccatcaccctgcccttcaaccccctgtgggggacctagggttcaaatgaacgtcactatccacacttctgtaaagttggccagtgttactctggggcaaacctaaatagaatgtcaaacggaatttgaattttacagaggaaatgtgaaagtcttagagaacatttcgctagtttttaaaactttttataggtcacagttcagttgccttgcagtttcatgaactttgccagtgttttcaatttagcataaaaagtgtggtcagatttgtataaacctcacctgggaacttgtttgaagcacaagttctcagacccctccccagactcactgaaactctgggggtgcagctcagcagtctgtgttcagtgagcactccaggtgcttctcagggctcccgtttgagaacactggtctaggtgttagaagggtggtcccctcccttctccccttcctcccacccctggcagttttgaggtccagatgaccaagcccggctctctagccgtgtattttcagcacttccgtagtgtgaagacagctcctgagagaatgactcatcgtctcatcctgggagattcatgtatttgtgtcacagcaggtgtaatctaaatccaagcctaggcctggaaaagagttaggaaacaaacatctgttttgggtgttcagactgacagatcagttgtctccctccacctcggaggcttccttcctgatctcctgaccacagtaatagttctctgatggctaatgaaaatagcaaattttatcaagttctaccttttggaaaataccattcattattttccctttaatcctcacaacagcccaacaaggtagatgctattaagatccttatgtccttcacagtgaaacagcctcagagaggctaagtcatttgcccaagatcgtgtagctaataaatgggagacgagagacttgagttcaagtcagacaccagattctgtaaatcttcagccagacttcccacctggttaagcaagctagatccttgagccaggaatattctaggcctgtggttcttaaaatttgtcatggatcaagatttctggaggacatcttaaagcacagattgctggacccttgtccccaagtgttagattcagtgctgctaggttgaggcctgggaatttgcatttctagcaagctcccagatattgctggtgctgctggtccggagaccacacttaaagaatcacttctgtaggccagtatttctcaaccagggctgtacattagaatcatctgaggaacttcagattcaattgttctagtgtgagacactgccattctatttttttatgttccctggataattctaatgcacagccagggttgagaaccactgctatactcaaaggaagactactaattcctttttatagctttggttcttgagtcctgtgtccattttttctaacggcagcatgcatacttctgggaaactcagtgtgtgcaacgggtaccaacactgcaagacaaatagtgctcattcatttcatttcaatattttctatgaaacaaacatctattatggagtataatgcaaagtgttcatgaactcttaatgtaaaatgtaatgtaaatgggatttagtccactcctaagaatttagccaaggaaaattgtcaggaccaactgtcaaagatatgtacaagaagaggcatctaagtattactttgtcttgataattgctgagtctgtgtgatggttatatggtgattcattgttcaaagaatatctaatacttatgtcaagtacaaaaaggaggatacaaactgaatatttagtatgactctaattgtacttttaacaaaactatatacatacacacacagaaaaaagactggaagataacacaacaaaatattaccagtgattatttcttgatgggattatgggtgataatgataacattttctaatttttaaacaatattacttttatgattagaccaaaagaatttgtgtaggcagtcacctattcttgtaaatacattctacaatgtctgcctgaaatacaaagcatgcatttgtagattagaagttttctcagagaattagaaagcatcttacaattgttaattaaggtcccaatgggtgctaatgcctttgggacctggaaatgtgagaatcatcataggaacctagggagattgtgctgggcaaaagggcttttgctctgcaaggtggttcttctaatggggttaggcagcaggggttgctagaggctcctcaggatgcatggggtgagtgtggggcttttgtcctctcctctagcgagtacacactcctccacagtgcttctgtgtgacatcaccaaagcatccactataattaatgtatcatagatcaaatgcaccctagtaaagggaatttagcaatgtccatgtagtgtgcaaatatgcaggaggtaagaaagttaagcatatgtaactcaaggaccacctatgaatgttaataaagaaagaacatatggagaaaactcttgtattgcaaaacatgaagcccatgtgccttcatcatccccagaagtctgtctgttcatgctccctgggattccgttcagaaaacaagtaaatggtgccttctgcacatttatgttaaacggagaaccaaaaagagtgactaccccactccagtgcttgctggggctgggagaacaaagaagctgcaagtatgaggtactcaaagacagtgttactagggtaatgattttccagtatggccaaaagacatcttctatgcaaccaagcctcacctggccttacaaaacaaaagtggtttggccagagcttgaataacagctgggatggatggcccaatgtaaaggagcaggtggcaggccagtggaccccactctggggtggccccatggtggacagagcccctgctccctaaaatggccaacacctgtcccaaggaaggccacctagccagaagtgcccaccatctgctgtaatcaaatttgcaatcacaggtaacttttcctctcaagggtccagctggcaatataaataaatggaatgaatggggctcctcagatgagtacagcatcttccatgtatggggagcagacattactgagctgctgccatgtgggaatctcagtccagttgtgccaggtcttctgagttattccaagagaagcaagaattcgtctttgtgttatagtttccagtttctaaatattggtagcattttaaaaatatgtagtccaaagaagacagtcctgtgggctgactttggcctgcaggcaccagtttctcatctctgcttgtgaatgtcaagttctagagagaccattgctttagtcacctctgtcctctccctcctcttcccactcctgcctcaccaagaccaaattccaaaagaccagttctcctcaaaagttgtgtttcataaggaccttaaaattggctactagtctaacagtaatttatttcagttgaggactttttaaactccatgactaaccattgagggtactttctggatgattaagttaataattttaaaggaattgccttggtttttgaggggtagagggtatattatttgggaagtggctgtttcaaagtgagtgggatctaggtttaaatccagcttcaccacctgtatcacttaagcaagtgatgcagcctctcttagtttctcattatttaaaaaaaaaaaaaaaaaa

SEQ ID NO: 58208 - DNA, 4704 bp, Homo Sapiens
gactcagtgcatcaaaggctggagaaagaatcaccctagaactgagtgccacaggcttcggaagctgcacaagactgcaacacggtgacagcttctatttctaacagcaaacctaaaaagctcaggaaccaaaataaaacggatagaaatgaaaccactcagagtatgacgacagtactcaaagcaactcacgagcatttccccacgctgtcttccaaaatgtgaaaaatgtgattttttttttaatggccacattggagaactgctatgagcagacctcatttatataacccttcccagcacctcatgtatcatcattattaaaaaacactatggggatcatgctttcacataactttgtcttatttgttatctacatagcctaagcaaatagtaaatgatggagaatgaaaataattgtcaatgtttagggggaaaaaaaatacctgcatttcaaattttttaaaaaaaccataaaatctatcttttaaaaaaggaaggagtaagctggaatccacaattgttagaaacccaaaagtgatacagaggggaggcaaaaaaaaaaaaaaatactatattctccacactgaaacaatgtatctttctcaacagcccagtttcatctgtagctgtattttccccactgaaatgccaccattaatcataacaacagatgagtaaaaatcaattaatattccttcagcatctcttaggtgtcttcaatcctgtgcgctgtcatccctttaaagaggaaggaaaagatccacagccaggaaacagactcagaaactcaaacccaggtctctggaccccacagggaagtgaggcacagccaagagcaatctgtgtccattactggcctcaaatgaccacatggaaacactgtgtgcagagccagccccccaagcccgtggcggtcctccttggagatgatggggtctggggagaggtcagagtcaggctcacgtgaacttcagaaagccactgcccaggatatgggtggaccgcaagtctaccatgggctgtcccagctccaaagacgtcagaaccccacagcgattgttattcccaaagccctttacgcttggctccacagcacacggcagagaaaatcgacagaaggaaggatgttcacaggtgtccacccctacctatgccccagtgacctggaaataaaatccatcaagagcaccggggtcagccagctggggtacgctggagagtatgggtggcagagggaaccccgctgtggattgatcatttgacactgtgttcagcataccttttaaaaaaatgttggtaccatgtaaaaatataacctaaataacaagtacatttttaatgctgagatggagaatttagcacctataatccttccagagatgcacaccacgcaaccacgtgagtcccctctggctctgaattccgagagcagctaccaacacaggcctccgctgcctgcactcagcacacctatcggaaagcgccagtgctggcatgggctttccctccctggcggctgctcctcctgcacccccatgcccaggcactccggccagaaacaagggaggagtctggggactgatcctccccctctcacctcccacatctacccaggtaccacaccctgccatctgtctcctgctgccctctgtcactgcaggagcccctggagagcacatcacccctcactaggctgcagccacagcccctctcagaaaaccctgctgtctgctttccagtgcagccctgtctaatcaccctccatgtatcctccccatggctcttcccccatagcctcaggttggagcacccagctttcgcctgcagaagcccctccatgcccccgacacagcaccccatgaacaactcacctggcaccgctactctctccagcctggtctctcactagccccctcaagcctggggctgtagcctttccaagccattggcagccaaaggacccccttccccagctgctgtgtgtggccctggccatgctccttgtctgtaaggccattctaacacctcgcctcctgccagcccctacgcccagtttattccatgtcaggaggtatggcctccatcccctgatggcccactcctccttacatgcccagccttgcgtcctcaccactcccccacagctcagacaggcctgccctgcccctgggcttgggcatccccacggtttccctgccagtgggcatccccacagttccttcgcctccagaggcccagcacccagttctgcctcggccccaggcacatggaccttcccttgggtcttagtgtctctttctcagacttgccttttcttggtggtttgatggtcacccacccaacctccttccctgaaagtctggtgcaggaaggggtaaaaacacatatacaaaggtcaccagcaagccagccaacaccagctctggagaaaacacggacagaaagacgtatgcccaccattcactcattcgcaagccgggagaacttacttacttccttgcctgcttgagaaacagccgccgcaccagagactgggtttcatagtgtctgaattctcaaggaatgtggatggaggacagtgaatctctaactggctgctgcacttctcacacttacagcttgctcattcgcactttaaagtcaaacctcgagtcccctcatgccagcagtcaccttctccccgatcttttacagtaactggggaaaggcagcccagagaacaggccagggcagaggtcaggctgcaaaacatgcttccctaaggacgtccaggctggagggggcccggcagcaggtgggtctttctttcagggtcttcctccaccaaattcaggactattccagaaagaggcagtgagtccctggatggggaaaccgctcctcctgagccttccccacagattggatcggagtggaaggtgcccccaggtgacagcacctagcaaggctgatgcaggccttctgcctggcccacaggagagccccagccccactccccagaccacagacgaccaaggctcctgtgtacgggggaagtaatcatagtgccgtgcttggcacttggtcattttagcaactaggtgttttagaaggaagcacaaggacctaggaactgggttgagctctgtcaggccttgcctctcagttaggatctgttgggtagatgggctcattgccactaaccagactcgtcttccagggagccttcctgatttaccaggctgcgtgagggccctcctctgtgcctgtctggtgtccctgcctaccttggccactgtctgcagacatcacagagagttgaaggggcctggcttgggcctgtgtgagcccccagcacctggggcctatccatagcaagtgtcggggaaactgctgcatgttactgcgtcccatctgcacggcctggctatgaggggccctcagctcagcactcagtgagaccaactcaacactgaaatggtggagtcagggtggcccgtgcgtccagcattcccattaccatactacagagcacggggctgaggaaacaggcacttgccaccatcaccatcatgacaagtagcctctcaagacaggaggtagagagcatctggtcccacgacccttactacactcttcccttgtcctgcagcccaactccctgctctaaacacaaagtaggacatcctcttcttctgagctacctgggtcctggctcccctgcaacttcctttcctgcctgagcagccctgagcagacagtgctgtgtctttcatgatcatcatcacgtggcccaacagaccaggtctgcagacaagtccactgccaagcaagtctcggagcacagttctgggccccagagtcagcccagtccagcccagccccatcagggcctctggacagcctgagagcaaggcctcgtgctgtccctctccgaggaaggatttgcctcaggcctggttctgagaagtaaacagggtaatgttctgaagcagtggacttcaaaccaaacccccacaaaataaatgtttaaaactacatatctatttgcacatttttaagttgatatgaaaaatttctcatcataagtctaaatacttgtagaggatgtaatttccaacatactgtaaatattaacatttaaaaataaaactgttaatgtttctcttttaaatggatccaatggtatctaaataccacggcgattagagattcgccatcatccatttttaaattacataatcaagctcttctttaaccattggaaatttaacagtgttccttttttcctccacaaactctgatctccctcagagatgtttatactatcacagtgtattttatgcttgaaagccttatactgattatcctattatatactatagggccaaaaaatacaaaaatcaatgttttaattttttttaatttcctgtgatttcctgtgatcataaagctctgtcagaagttttctcctggactgaattattataacaattactataagtatacaattgatcaataagacagaaatatattgcaaaattgtataagaaataacctttaaaaataaacttaattaggccaggcgcagtggttcacgcctgtaatcccagcactttgggaggccgaggtgggcagatcacctgaggtcagcagttcaagaccagcctggtcaactggtgaaaccccatctctacttaaaaaaaaaaaaaaaaaaaaaaa

SEQ ID NO: 58209 - DNA, 3788 bp, Homo Sapiens
ggggaggccaggaggaaatgaagctaggaggactacagaaattgtcataaagtgtgatttctttctacccctgtttttttaatttgtgttttataggaagctggtttgggcagggcctctgagcatggtttcagaggctcctgccagcattgtgtgagctcagccaactgccaactgtcctccttatacctctcccttattcaaggctcccccgaaagcaaccacctcacagggagactttggccaagaagccataggtgctgaatctgcttttggtgctgactggctcaggcagacagagcttgatatacagagaataaacgtcatccctctaacattaatatgttcagttttatgtacctgagagttgatggtttaatttgtgggtttgcccagactctcttgcgacttctctcatcatctgctctttagcacttccatgagacggggcaagagattgttggagtctcaatccagcagcccgaaagcctgtctgcagcttgggtttgagactgaactaactcagggtgttttgtggattttagttatccaggctgtccctgttccctcattaacaaaaacaaaacaaaccccagcttttttttttttttaagaaggaaattgggatcttttcctcatagcaccttatcttaatatggaggaaagagttgagccattttatcaaaaaggaaatcaaatcccccttggatgcctaatgtgaggcaactggcaaccaaactcacggccggagaaaacaaacacaagaatgtggcttccatgtttgagattagccaagacaaagatagcagggatgcctcccggaacagttcctggtggtttgtcaaagtccacaaagcttgcagtccctttgttgaaatcactgataagcatacaagaggaaaattatagttctgagtttgaagaccttttctcaccttgggggttaaaaaccaataattctgaaacacatttggcctaatcaatgaagtcaggtttccgttgggatttgggcctcattatttgtctttcatcttctgggaacagatgacaccaggtcagttagctctgtgccaggggaaaaaaagaacagaaaaaatatttcaatggaaattttagaattaggaacaattatttcattattattatctttttctatttccaaaaaaataagatgaagagtcatttgcaagctccaaggcagctcccctttctgtacccacagtcttactcctcctttgctcaggcagctctatgaaggcctcctcagtgctgcatatgtgccctacgttcctgtgttgtccaccgcaccatgccctgccttccagccaccccacctgctccttccttgccagctccacctgacactgactctcttgactctttgtggctcaaccttctgattctccctattcagctgggagacattccccacaacagtgacacctgtatacttcaattaaggccactttgcacatactgagtaaacactccctaaattgggctaagaagaatgcacaaagtcacaaagtcctccaaactatgtgttagttacaaagagaataatattaactttacagtggagaaatccagcagacaccacctgtgttagtttcttatgactgctataacaaagtaccataagctaggtggcttaaaacaacaaaaaatgtttgtcttattctggaggctaagtctgaaatgaaaatgtcagcagaggccgggtgtggtggctcacacctgtaatcccagcactttggcaggccaaggcaggtggatcacctgaggtcaggagttgagaccagcctggccaacatggtgaaaccctgtctttactaaaaatacaaaaattagccgggtatggtggtgtactcctgtagtcccagctactcgggaggctgaggcaggagaatcgcttgaacccagaggtggaggttgcggtgagctgagattgtgccactgcactctagtcccagtgacagaacgagactctgtctcaaaaaaagaaaaaaaaaaaaaagacaaaagaaaatgtcagcagagccatgctccctctgaaacctgcagaggaatcctttcttcttccaagttcctggtgtttgctggcaatccttcatgttctttggcttgtagatacatcactccagtctccacctctctcttgtcacatggccatcttctccatgtgtgtctctaaatttccctcttcttataaggacaccagtgattagatttagggcctactctaaactagtgtgactcttcttaacttgattttatctacaaagatcctatttccaaataaggtcacattcacaggtatctggagtaagaacttacacttatctttcagtgggggcataattcaatccataagaccatcttaactacgtagtcaaagttaacatcaccagtaataagacttagcaacatggtgtaccacctatatgatataccaggaaggatacatctttgtgttttttcttgccaaaaatgcataacctgaacttaatcgtgagagaacgtaagattaatctaaagtgagagacattctataaaataaccaaccagtactcttcacaagtgtcaattagagagctctagtattttgctataagatcatgaaagacaacaagacagaggaactatatcacagatgggacagaaatataactttggattctagattagatcctggaacagaaaaaggacactagtgggaaaacagaaactggtggaatcccaataactctgttaatagtttagttaatagtattgccccaatgttaatttcttagttttgataaatgtactgtggttatgtaaaatgttaacatagaggtagtggtgtaaaggatgtatgggaacactctactaattttgcaactcttctgtaaatctaagattatttcaaaatcaatgttttgaaaaagagtatgctcatattaagggaatagataagctcacctgttcttagaggcaaagatggcagggggaataatctttagcaaaaacataccaatttgtgagccctattctaggctctgataattatcttgctattcacaaagtactgtgctatgtgctcatcgtcattatctgtctgtttttgggcagaataatgaagcagaggtgtatagtccagtacatggtccacattttgcctctacctgaaatacgtgatcttgtgtatttgtgctccttaaaccttggcttgctcacttataaaatggggataatgatactagctttctcataagatgttctgaagatgccaagagcaaatccttataaagctcttcgcccagcacctgcacagattgtaagttccctgtaaagcatagctcctacccacagaattctcactgctgtattacgaggttatttccccatttttcagttgaagaaactgagtaagtaacttgcttaagacaagattagtgaatatgagagccagactaaaatagataaatctataaaaatatggctcattctcaaccattttgttagaaaaacattaacacaagagggaaaatctgtaggaattcgttgaaagaaaaggtacaaagcaagctgtcaagtgcccccatgctgggtggagtggggccatttgaagtaaagcttatagctgggaagaggcagaagcaggaattaaagaattgtccatggcgtgaacccgggaggcggagcttgcagtgagccaagatggcgccactgcactccagcctgcgcgacagagcgagactccgtctctaaaaaacaaacaaaagaaaaaaaaaaaaaaaaaaaaa

SEQ ID NO: 58210 - DNA, 3660 bp, Homo Sapiens
cagtcatgactcccacactcactgtacaaggaagtgaacacagtaagtgtggatctaccagatcttcactaagcctcagggcaaccctaaagagaggacaggcatgtttatcctcatttcatccatgaggaagtggaagctcaaagaggtcagatgctgcatctggggtcagtgtggttttctgcctctgggaccccctacccctgaggccagtgtccatccccctcagcaggtgtgtggagccctccggacacaacatcttgctaggaattgcatgacagttactgatcatttatcttttaaaatgggtcaataggctgaaggaaagatgggaagtttctcagatatcacatattggcagatattacagccaaaatacacatagagggaaacattttggggaaggttgtggccatgataaaaatcagtatttattgagcctgtgatatgtggcagacaccatgaagggtgcattgtagacattaccacatacaccccatgcagccatagggtgaccagccacctacttagccagggactgaggggtttgctgggatgagggattttagttttaaaacagggatggtcctgggcaaagcaaggtaagttggtcaccccacccgccaccccaaggttaagatggacttaccttcattttgtaaatagaaaacccatggctcagagagttgaggtaactgcccaggctgctctgatggcaagaggtgcagctgaggcctggaccaacacctgtcagaacccaaagccacattttttgaccacgacacctttgtcatggccatgaagagcagtccctcctgcgaaggaagtctcaaggtcatccatatgaccaacaccttgaaaagatttaggtgataaaattgagattcttaattcttttgaaaaaaatgattaaaatcagaaaattattttcagataaagtttatgccaaaagatacaaaggcttgctctgtaagagataaagcgttttgtggcaaacaaacaaacacttcaagggcaaagtcaggccaaccgtcctgctctctgccatccggtaagtctctccatgctcatggtcatttgtcgcccagtgtgaagactgctaagggcagatgacatgctcagtgtttctcagttgaccgtattttttaattgagtttttagacaaattaaattaatgaatttgtttgcttattcatgtagagtaaaaagcaatacccactctactccaaaatagtagctcaagctatgattttgtaaattgctatggtttggctgtgtccccacccaaatctcatcttgacttgcagctcccataatccccacgtgtcatgggagggaccctgtgggaggtaattgaatcatggcaacaggtttttcccgtgctgttctcgtgatagtgaataaattctcacgagatctgatggttttataaagggcagttcccctgcacacacactcttgcctgctgccatataaagatatgcttttgctcctccttcaccttccaccatgattgtgaggccttcccagccatgtggaactgtgagtccattaaacctctttttctttataaattacccagtctagggtatttcttcatagcagtatgaaaatggactaacacacaaattatattaaaatgcagcatccttacagaaaagtctgcaccagtcataagcacacagagctctgaactttcaagtgagccagcacccagatcaaggaatgtgacaggcccattcccccagcccaatccccttattgctcttccagtcccttcatgcctcccttccaggggtaaccattgtccccacttctgacaccatagattagtttcgcctgctttcgaactttctataagctggatcatagattatatcgaagtatttttatgtttattgaatacctactatgtgcaaggccttgcctagctattcaatgaatctaaatgacttggttttgaatgcctcccaggttgctctataggtgtgtgtgtgtgtgtgtgtgtgtgtgtgtgtgtgtgtccctggatataggtcacacagttgtcttagccgtcagccctcaaaaggcaggttcacatggtggccagctcacatcctgtgtgtgttcaggaaggcactgctgccatgcaaatgtcatttaaatgtggcatatctatgaattcaacagggtaatttggttcctatgttgttggaaagttatctgaatgctgaagtcaactgcactccaggcttgagtaaacaagtcaggacaatgaagagaggcagttgctgttaggtttggtggggggaggggaaggtgactttcacaagtcctcttgtacaagggccaccgtgtgaaacctgatgtccagtgaagacacagcaatccaaatagatcactgccttccagccccagggtctacgcaacaaaaagccttccccattgaggccatctggcgagttctgcctccaatgtcctgggagcagtcagccagagctcagggcagggggcctccccagcctccattctgcagatcgttctttctgggcaattcatgctcattcccacacagaaaggtttgaggcaatttgtggaaggagcgttgtatcaggatggtttctaattcaggtggattaaggtatggatgctgtcttcactgctcacttgtcaaataactgaactcctgacttctttgaactctgggcttctaatctgtgaagtcagaataataataactgggtagttgtgagcattaagtttaaaaatatgttgtggcagcactttgcatgagcagaccatagtataaatgccagctccctttccccggagataagaagtgattgtgattgtgcgttaagttctgttttaagcttcctagctgacaaggcaaaaatgaaacacaatggcttatattgttctagtctgattcaaagaatgtccctagtttttcaggaaatataaacactttcctggtgttacattctaagacaactttattttgcaagcctaaatgattcagtcagggtttccaacaatggttttcaccccaaaagatggagaattcccctttctatttccatagcatgtatcaatcctttaaaaaatactaatctggggttatgatagtgcaacactaaattcggaaggcgaacgccatggagctggaattgcattctgttgctccatttctttcaccgtctctttttactggacatcttatgataagaacgtaaatggaaagggcaagcctggagtgacaaagggaatcctccattcactccatacagtgctgttgctgggctcgggacgtggagagggcaggggccgtgaagacatcctggtgcctttgcagggtcgtcatgaggataaaggggatgggccaggtgtgacagctcaggtttataatcccagcactttgggaggctgagactggcagatcacttgaggccaagagtcccagactaccctggccaatatggtgaaaccctctctctactaaaaatacaaaaattagctgggcatggtggtgcacacctgtaatcccagctactcgagaggctgaggcacaagaattgcttgaacttgggaggcagaggttgcaatgagctgagattgggccactgcactccaccctggcaacagagcgatactctgcctaaaaaaaaaaaaaaaaaa

SEQ ID NO: 58211 - DNA, 3358 bp, Homo Sapiens
atgatggaattgagacccagtaacttgcctaaggcaaatgaactaagtagaggagtgatgatttgaatcccaatagttccatttccaaaaccagtacttctctattcagtagtcaagttcatgcgtttttatctctttttaggctactactgaggattgagaaactgcctctctgcccccaaaccaacgtttcactgtgccctggaagagatccccagtgtgtctcggctttctatgttcaagtcaagcctgggattggggattttttgccagttgtgggttcaagttcggcatgcatggtggggtgggctccacaaaacaggctgggtgggcaccaaggaagccaggcccccctacttgcccatcaggggcctcccagctgataccaagctctcagaccctggggagttcaggactcttcctgcatgtgtagccgcaggtgataattagaatctgtgttgctaacatgaagcaacagcacccaaacgatattcatttgtttttggttagagagacaagcacttgaactatattcgtttatttttggaatttaaaatatttgagggggctaggtgaggtggctctgcctgtagtcccagcactttgggagactggagggttgcttgagcccaggagtttgagaccagcctgggcaacatagtgagacctcatctcttcagaaaatcaagaaattagccaggtgtggtggtgcacacctgcggtcccaattccgcaggaggctgaggcaggaggatcacgtgagcccaggaggctgaggctacagtgagccaagatcatgccactgcactccagcctggaagtcagagcaagagaccctgtctcacaaaataaaatatctgggttagtagtcagtctgctggttggcactaagacaaataaagtctttaaaatgaacaccaaccagtggtgtgagggaagaatgaggtctgagcactgctttggatttgatgtcccctcaacctcatttctatcttgggtaaaccaaggatagagctgctgcctgacctcagagaggcaaagtgagaaacaaatgagttaatgtagcaaaagggctttctaaatgccaaagcactctactcattattaattcttaattacttatattaattcttaatatgcattcagccatgaaaacatagtgggtcaggctataaaagacatcatcgggccaaatggcaacattggatgtggatagtaaatgagatgaaggtattgtattaacattaacatttcctgaagttgataattggcttgtgatcatgtaagagaatggccttgttcttaggcagcagttcccaacctttttggcaccagggaccagtttcctggaagaaaatttttccgcagacctgggttggggggatggtttcaggatgaaactgttccacctcagatcatcaggcattagattctcataaggagcgcacaatctggggacccctgttcttaggaattaacacaggagtatttaggaataaaggggcatggttataacttattctcaaatgattcaaggaaaagaaatagtgatgtatatatgtcagacagatccagagagagaaagatgagaataactcatcaagtaaatgaggcaaaatacaaacaattgatccttctgtgtaaaggggtatgtgagtttcttgtatgttcttgaaacttttctagtatcccccctcaaaaaattgtcatcttaatattcattatggttattcattttatttctcaatttaaaaaaaccatcagatggctgggtgcggtggctcacacctataatcccagcactttggggggccaaggcgggcagatcatgagatcgggagttcaagaccagcctggccggcatggtgaaaccccatctctactaaaaatacaaaaatttagctgggcatggtggtgcacctgtggtcccagctactcaggaggcggaagcaggagaattccttgaacctggcaagcggaggttgcagtgagctgagattgcaccattgcactccagcctgggcagcagagcgagactctgtctcaaaataaataaataaataaataaataaccatcagacaaagctagcatatgtggagcctagtgctggggtgtatcagtataataaaaatgcaggtgccaaaaataacagttatgactggacacagtggctcacgcctgtaatcccagcgctttgggaggctgaggcgggtggatcatttgaggtcaggagttcaagaccagcctggccaacatggtgaaacccggtctctgctaaaaatacaaaacttagccaggcggtagtggcatgtgcctgtaatcccagctactcaggaggctgaggcaggataatcgcttgagtctgggaggcagaggttgtggtgagccgagattgcgccattgcactccagtctgggcgagagagtaggaccctgtcccagaaaaaaacccaaaaataacagttatatcttttgagctgtgtgtacacctgatttagagaggtcccagagctaacccaatctgtgagtattaactactttcaaaacctaacagagaagtagggtcagggcttattgtggctggtggcggagccagttgtgctgccctgaggatgtgattttgatgctgaggctgcggcggagcagaccctaagcccaccttcctaactagattatcttggattacttactttctcgtgccttagtttcccagtttataaaattgaaactattctaattcttaactcacagaggttgtaagatgactaattagatagttcacataaaggactgcaacactgtgcctggtactcagtgatctccaagagttagctgctgcccatgttctttcctattcctcctcccccaccctgattctctctccccgagtctgctgatgattttgtattgttccccccatctcaaaatgtgaccagtaagaagctttacaagatggtctgcatgtgtacaggggccagcagggagccaaattcgctgagtttcctcctccttccttctgttcattcattcattcattcccttatgctacaggaatttgttgagcttccagtgtgccaggcaagtggcaaacatttcttgaaaagttcagaagcaaacagtcatcatgagcttgatagccagttacattttgagtgacatatgatatattacctggcatagtgctattttgtgcatcaagattggtccagttgaggccaggcgtagtggcttacacctgtaatctcagcactttgggaggccaaggtgggtggatcacctgaggtcgggagttcgagaccagtctgaccaacatggcgaaactgtgtctctaataaaaatataaaaaaaaaaaaaaaaa

SEQ ID NO: 58212 - DNA, 3029 bp, Homo Sapiens
ttttttttttttttttttgccaaccctcagagcagacaatctatctataaagtcagatttgagtggagaattaaaggaattatctgaataattaaaacaagaacactaatatctttgaaaaggctatttaagacttaatgatgcctacaaccatttacttgttaaagtctacttaaatatttattctacattgctagcgctccagacatacatgcatatcttattagtggattcattcaaaatattcacacacatggaataaactcaagaacataataactcctaaataggctttgatcagaaaaaataccattttcaaggaacagaaaaccagtttgaatataacaatcataaatttggttcctacctgacacatactctgtgaggagcttctgcaacagtggtacattttcaagataaagttctaagttctagttctaagaggcagtgtccatccactcaggtctacaggctcttatataaatgacgtagacctaaactccaaagtttacatacacaggagaagtgcccaaaataattggtgcagataataaattggaagaagggatgtaaatgtgggttggagttaggaaggttttgtgaaggaactgtgagtcttgtgttagactttaaagaacagataggtttggcaggggtgatgacaaagcagtgggcaataagcaaatcatgtgaaaggttattgagagttccaaacactgaaacagaaggctttgttggcccataggctaaaccattagagaaatgttgggatgcaccatagcaagggatttcacacccagtaggctcacagcaggcaaaagagaatccctggccatttctgtaaggctttgagattttctgagcactttcacttttcttccttgagtattactgtggatggaggcagacaagataggctgtattgtcgctaatttacagatgaagaaatggagatgagagaagataaatgactttctcaacttcccagagccaggatgagaagccacatctagtgaataactgactctctccactacgtcttcttctctgctacatattcaatgtcaggggtctcagcccctacccccaagagagacaaggtaaaagaacaaggtgaggcaccatcagggtccttgcttttgagcatgaaagcctcacactcctacactcaatatccacaatacaaaacatgagcctggtggcctggggacaaatctccttgaggtgacttgctttattcttccccttgcttctcaacaaagtgacacagaggctagaggagcctcttctcttctctttggagaatcaaagacctttattgtagagaagcaccagactgtgttattacatatttattcttgtaattgaaaaatattcattctcattttctgaacgattttgtttcttagtcgaatatgagctgtttaggaggtattaaacatttgttcatttctttatatacttacttattcccttatccagagggagaaggcaaagtatgtattgtgttaccccatttttcttgtttctgaaatcaaattagttgcttcctaaattttcattaggaataatccttggccggatggggtggcacatgcctgtaatcctagcactttgggagactgaggtgggaggatcacctgaggtcaggagttcgagaccagcctggccaacatggcgaaactccatctctactaaaaatataaaaacttagctgggcatggtaacgggtgcctgtagtcccagctactcgggaggctgaagcaagagaatcacttgaacccagaaggtggagtttgcagtgaaatgaaatcgcgccactgcactccagcctccaccctgggcgacagagcaagactctgtctcaaaaaaagaaaagaaaagaaaagaaaattgatggcttgaatcactggcttatagcaaacatagttaagatatggcaaggcaaggatttgaaacctggtgtgcttagttgccaaagtctcactcttttctgttgtacctcccgattaatttaggtttgacttccttcttcagcatcttgggcaatgtagtaatagaattgatgaaaaatagtagtaacaattattgcccacctcagcctttgaccccttctgagctctcttaatcaacctcagtgctgagacccctcccctccattcaccactccagccctctcccattctgatgccatcatctccctgcttctatccagcctcacgctaaccagaatgtggagctttttgtgagcttgatttctgattcctctggctgccgatggagatccctctgaaggtgctcactggagcaattattctgcttgttcccccatctctcacccactcccccaagtatagttatcaggacgctgctgtatttcccattgtccaaggactaattcatgaaatagggctggcttacctctggttttgcactgactggctcagagatattttgagatccatgaggtgagttgtgttttcagcagatttcaggcacagtgtggcattttcagtgatgtctctatcgaaggccttcctcagcttgaacagctataaaggggtgatgctgctaggagctgccttgtccaagagtggaggcatctaatgtgactgcggaggggctgggaagtgttctgcacccttgcttgtctgctggtttcaaatgaccgctaattaaaggcaaatcctagcaccgctcatcagcatcttggttcaaattagttgtttcccagcaaaaagggcagacctctgaaagactaaaacacagaatagataaacactgagtggaaaggtcagggccaaaagacacttctcagcagagcggggcaggcagagtggaggttctcgtaactggaggccagtctgcaggttggaaatgggtggaacttgaagtggtggggaggtatgtacatgacaatccctagaaatatcaaaaagttattaatacatgggaatagttaaactgagaaactgaacttcagaaattaatcccaggattaaatttctgctcaaaaaaaaaaaaaaaaa

SEQ ID NO: 58213 - DNA, 2788 bp, Homo Sapiens
acacaaaacccggaaggaccccgccgaaggttttctccggttcgggagagagacggagtcccgctctgtcacgcaggctgccaggctggcgtacagtggcgcaatctcagctcgctgcaacctccacctcctgggttcaagcgattttcttgcctctgcctcctgagtagctgggattactggcacacaccaccatgcacagttgcaggaatttagccaattcagaggtcttgttctccataatttggaattttccttcggatttgatcaagttggatagagttggtcaaacccaatgggaaaaagatgaaaacaacaagaaacagaaacaaacagcaacaacaacaacaacaaaaacagttaagtgaaacaaacaaacaatcacacaatttatgtggtcactgagtgctctaatagtaaggagaaattaagaccagctggctgttagtcttaactctagccaagacaaaactccaattcagctacttacctagtaatgagtctcaggctgaagtctgctctctcccatcctagaagcaggaaaaaactgaaactcatcttccctgctggaaacgagctcaaactccagaaaggagttacctgccttccatcatcatggacgcaggaaaatttgccttccttgttggaagcaagtaaaactccaaaaaaggagttgcacagcaaaataaacttcagatctcaacaaatttggggagatcagggattctctgggggtggggtggctcccaggcctcagccaattgtcctattggtttcagccataaagacagctcaggctgctaccacgcactgataggagatttgtcaaagatcgaggcatcttcactcagaatccctctgtgattaccaattgtgaacacaaaatatctgatatgggtctcagtcaatttagaaagtttattttgccaaggttaaggacacatccatgacatagcctcaggaggttctgttgacgtgtgcaaggtggttggggcacagcttggttttacacattttagggagacatgagatatcaatcaatatatgttaagacatatatcaggtggtccaaaaaggtgggatgactggaaacagggagggggcttccaggtgataggtagataagagaaaaacagttgcattcttttgagtttctaataagcctttcactgaatacacaatttacaggactaatcacttaagccttagcctggctcagtgaaacaacagggcaaaggaagcaatcagctatgcatttgtctcacgtgagcagagggatgactttgagttctgtctagctatcttgtttaggaatataatgagaggcaggtttgcgtgcagtttccagattgacttttccctttggcttagtgactttgaggtcccaagatttattttcctttaacatttacaaggagaagtgaagaaataagtaaattagagagctagaaggatggaagtttacagttagagagagtgggatgttgaaggtaatactggttgcatatttcttatccaaaatgcttgggaccagaagtgtttcagatttcagatgttttcagattttggaatatttgcattatacaggttcagcacccctaatctgaaaacgtgaaatccaaaattctccaatgattgtttcctttgagcatcacaatggtgctcaaaaggttttggattttagagcatttcaaatttcagattttcagattagggataataaacctatatctcagaaacggtacatttctgaataatgacaaattgtcattatttgccatgagaattgtcattaatgtgggtggagatggggatgattgtaggtcaagagactgaagcaatagggtaggcttgggtgttagtacggcccttcatgggaatgtgttgatgtcatccagggtcacgggaggcttctgagtgggaaggaagctgagagcctatgattacggtcttcactgatgaaggcagacagtaggaggttggcagatggtgggcactgactagactggaagtgccaagaacttcagtggagcaaggttttacccaagacacagaggttgtggtctagagcagcccagggatgaaggatcacccattggagaggactgtggggaaagcagagtcctgggagatgaaccaagcatcagttgaggctggaacagttaaaatgtatacatcaaattctctccaaggacactgtacccttggctgaaaattccctccttagtctacttcccatcccaaattctacccatccacactgtggcatcctaggtctctctagcagctgaacaggcaggcctctgtaacaactgtttcagcgctgactgagtggttaagttaaatattaaaagttgaaagagccagtaaccttatacaaaggctggaatagaacaaaagcccaccacaagtttttgcctaagtctttcctgtgccttgaaccatgacaagaggaggaaggaattcttaaccagacccatttaggattaagtaagtttttattggctgggtacggtggctcacacctataatctcagcactttgggaggctgaggcaggcggatcacctgaggtcaggagtttgagaccagcctcctggccggcatggtgaaactctgtctctactaaaagtaccaaaatgagccaagcatggtggcgggagcctgtagtcccaactactcgggaggctggggcaggagaatcgcttgaacccagaaagcggaggttgcagtgacctgggatcacaccactgcacttcagcctgggcaacagagtgagactccatctc

SEQ ID NO: 58214 - DNA, 2766 bp, Homo Sapiens
gaaaacaatacttcaagctccacatttgggaaccattagcacagaggtcctggctgatttctcttccctgcccaggaagccaggagagatgcaggccactgaagcacactggctggcctaaaacaagggcaaggcctttccttgttaaagatgtcatggcccaactcaagactcattctcaggcctgcacgcacatatgcacatatacacgcgtgcatacatgtggcaggaaggggcacagaacctggagtccagtcacctctggctattgccagctatttgctgggacaggtcatttgtcctctctgagtctcggtctcctggtctgtagccagggagaaataatacctactgcacaggactatggggacagccaaaagccttttataaacctaagaaagggaagtcgttaggaactattcatgggcactcacagcaaggcaaccccatcttgtaggagggcatctgtccccagggcagggatcaggagagctgtttccagaggcttccagggtaacttggagcaaatcacttacctttcttggactcagtccctggaagaagaggccattccagaccgcttcctcccacgaactcattcattgtgtcagcaaacgtagactggggttctgctgagggaggccgatacaacccaccactgcccacgggctgtgcacggctttgctgtgggaacaggcctgtaactgcggcacaacctgcgatctggacaaagggcagaggaagctgagactctttcccctggggtgggggcttgaggggcttgggaggactctgcagaagaggtgacatttcaacagggccttgaaagccaaataggtattttccagaggcagagtggggatgggcaaaggcattccaggtgagggtgacatcctatggcgaggcaggcctgtaggtgggaaggaggggaggatgggcagagagtttgtgctgtggagcacagtagcccagtcatgagagaggtgcaggatggagcacacagggtgggctgggcaggctgggcagggtgctgattggcggctgcagggctgctccccaggcatgggtaatcatcccacgcatctggaggcaggctctgtatgcatctggttctttccatggctctgaaaacagtcttctttttttcccttgatgaaatcctgcagtccgctcccatgtaccagtacctggataggaaactgttcaaggaagcctaccagattgcttgcttgggtgtcacagacactgattggcgtgaactggccatggaagcgctagaaggtttagattttgaaacagcaaagaaggtaagcatctagccagcaggagctggagtttggtccttgtggggtcccttaagaaggcagatggggacccaggtggcacggagaggccatagactgcagcagtctctggagttaggctgacctgggcttgtatcttagccacttcctcactgtgggcctgggtaggtgacaccctttctaagattgcttctctatagacgtaggatgatgacaggccccatcctcacaaagctgtgaggatcaaatgggaggatgcctgtaaagcctgacccaggagcagcatgtcagattctggctgtcactcttattagctgttctctgtgggaagcacctgactagtagcctggcacatcacaggcactccgtaaatggcggcttttattatcggtgtagtcactggccatgatgctgcacacaatgctgcttttcttagcatctgccaactaaggtgggagagatggtcaaggtctctgattctgacagcaatgtgggcacttcccacgtaccttcatggcgggattcatggacttgattcgttgtgtcctttcctggcctagtctatgaaagctagagagatggctgaaaacatctgacccctctctgcacataaggaaaagcccaggtatgttcctgagctgtgtttccatctagaacctcagatggaggaaggaatggcttccaacctccactcccctaccccttccctctttatctccccacagtcaattaatgagctgctcattttgtccatattcccgggctgacattgaaggagtggcaaagagggacgtgatgcccgccttgggttagatcaagacttgtaggcatgaagagaggagactggaccagaccaggactaagaagcctggctgagaacgagctgtgtcacataaggggctctgggacctcaggccagccactttccttggagccccagtcctcccagttctgaaatgggggtggtgagaatgcccgctgcagtcatgaggcttaactgagatgttgtaaaggggaatttaaatcagggatggttgtgcagatgctagccattactaaacaagggaagtgatcgttgtgtaacaatgatctagattatatttttagatgtcctcagtgtaggaaagtggagatggaggaggctgtaagaattcagaggaggggccaggcgcggtggctcacgcctgtaaatcctagcactttgggaggccgaggtgtgcggatcacaaggtcaggagatcgagaccatcctggctaacacggtgaaaccccgtctctactaaaaatacaaaaaattagccgggcatggtggcaggcgcctgtagtcccagctactccggaggctgaggcaggagaatggcgtgaacctgggaggcggagcgtgcagtgagccgagatggtgccactgcactccagcctgggccatagagcaagactctgacttaaaaaaaaaaaaaaaaaa

SEQ ID NO: 58215 - DNA, 2763 bp, Homo Sapiens
acgtgtgctattccatcccacatggcggcgctcctgaggagactgctgcagcgcgagaggccttcggcggcctctggccgccccgtaggacggcgcgaggccaacctgggcactgatgccggggttgcggtgcgagtgcggttcgctcccagccccacaggcttcttgcacctgggtggcctccgcactgccttgtacaactacatctttgctaagaagtaccaggggagcttcatcctgaggctagaggacacagatcagactcgcgttgtgcctggggcagcagagaatattgaggacatgctggagtgggcaggcatcccgcctgatgagagcccccgccggggcggtcctgctgggccctaccagcaatctcagcggttggagctgtatgcccaggccacagaagcgctgctgaagaccggagctgcttacccctgtttctgctcaccccagcggctggagctcctgaagaaggaggccttgcggaaccaccagacgccccggtatgacaatcggtgcaggaacatgagccaggagcaggtggcccagaagctggccaaggaccccaagcctgcgatccgcttccgcctggagcaggtggtgccagccttccaggacctggtgtatggctggaataggcatgaagtggccagcgtggagggagacccagtcatcatgaagagcgacggcttccccacataccacctggcctgcgtggtggacgaccaccacatgggcatcagccacgtgctgcgaggctctgagtggctcgtctccactgccaagcacctgctcctctaccaggccctgggctggcagccaccccacttcgcccacctgcccctgctcctcaacagggatggcagcaagctctccaagaggcaaggggacgttttcctggagcactttgctgctgatggcttcctgcccgattccttgttggacatcatcaccaactgtggctcaggttttgcagagaaccaaatgggcaggaccctgccggagctgatcacacagttcaacctgacacaggtcacctgtcactcagccctgctggacctggagaagctcccagaattcaacagactgcacctccagcggctggtgagcaatgagagccagaggcgccagctggtggggaagctgcaggtccttgtggaggaggcctttggttgccagctgcaaaacagggatgtcctcaacccagtctacgtggagaggatcctcctgctgagacagggtcacatttgccgcctgcaggacttggtgtccccagtatactcttacctgtggactcgccctgcagtaggtcgagcacagctggacgccatctcggagaaggtggatgtgattgccaagcgtgtgctggggcttctagaaagatctggtatgagcttaactcaggatatgctgaatggagaactgaagaagctatcagaaggtctggaaggcaccaagtacagtaatgtgatgaaactccttcggatggccctcagtggacagcagcaaggacctcctgtagctgagatgatgttggccttgggaccaaaggaagtacgggaacggatccagaaggtggtttccagctagggagaggatgtgtcgggcagtggagatcgccctaagaacctgtgagcttagaaacagctttcagagaccagaaggaggcctggggcccgtcgggaagtttgctgaaggaactaagagtggaaacaatctctgactgcacacaagtgcatttgtgatccaccacaggcacgtttttgtcaattggctggggaagcccaacccatctaacctcctggactctggaaaggcattctccgggtctggtttctcacacattacacagcagaggtttggagttagttcacagaaaagttaacatcccggaacagtgcagaaggcttgggtttcagtttgctagggcccccataacaaaatgccacagaaccaggtggtttaaacagatttattttctcacatttggaggctagaagttcaagatcaaggtgtcagcaggcctggtttttcctagaggcctcttttgttggcttgcagacagctgtcttctcactgtgtccttgtgcggtcttccctccatgcacacacatctctagtttcattatgtgcccaacgttcctcttctaagaacaccagttggactggattttaactttaaccagcctcatttaagttaatcacctctttaaatgctcaatctccaagtgaaaggaggatggtggcagggtacatgaacccctaccaggcttctaggcttcccctgcatggcagccagcctctaagttggcccccaaccatccctgccttcttctattcacacccttgtgtggttccttcccacattgaataggcctgacttgtgtaaccactacactattgaagaaatgagagtttgacttctgagggtaagtcataaaatacatcgtggcttctgtcttgttttctttgatcgcttactttgggggaagccagcttccaggtcatgaaaatactcaagcagccttatggagtgctccacatgacaagggatggaggcctcccaccaatagccatgggagtgtgcaatcttgaaagctggtccttcaattccagccaagcattcacatgaccgcaatcctagctgatctcgcttgtgacctctatgggagaccctaagccagaaccactcagagaagctgctctggaacgtcagacacacatgaactgtgagatagtaaacgtttattgtttaaagct

SEQ ID NO: 58216 - DNA, 2635 bp, Homo Sapiens; identical to SEQ ID NO: 24546

SEQ ID NO: 58217 - DNA, 2538 bp, Homo Sapiens
atcttggcaaaggggggatcaggaagtgcggaccgcggcggcgccgccaccaccaccgccggcggcggcagcagccatttcatctccacagaaaccagacacaaaaacatggcagaaatggagaaagaagggagacctcccgaaaataaacggagcaggaagccggctcacccagtgaaaagggagatcaatgaggagatgaagaactttgcagaaaacaccatgaatgaactccttggctggtatggctatgataaggttgaattaaaagatggtgaggatattgaattcaggagctaccctacagatggggagagccggcagcacatttctgttctcaaagaaaattctttgccaaaaccaaaattacccgaggacagtgttatttcaccatacaatataagcacaggctattcagggcttgccactggaaatggactcagtgactcacctgcagggtcaaaggatcatggcagtgtgcccattattgtacctttaattccaccacctttcataaagccaccagcagaagatgatgtgtcaaatgtacaaataatgtgtgcctggtgccagaaagtgggaatcaagcgctattccctgagtatgggaagtgaggtgaaaagcttctgcagcgagaagtgctttgcggcctgccgacgagcctacttcaagagaaataaggctagagatgaagatggacatgctgaaaattttccccagcagcactatgctaaggaaactccaaggcttgccttcaagaataactgcgaactacttgtaagaataacatacttacaacaagtctagaatgttactttagcacagtgaaaacagtttttgaaagggtttgttcatgattacataattgatgaaatattatagttttctgtatagagttctaaatgctaattctgatatcactgaatattaattttaagatctcaaattgtttgcaaatcttttatatctgattatagagcttgaatggccctgtctttattagcttgttgtgtttagtagtttataagcagccacttggagaatggctagtaaagttaaaaatatagagaaagacagttgatatatgtagcttgggaaaaaagaacctcaccctcacccctcctcctacgtcctcattgtacactattttaggagacaacatggtaatattttgttctgctagggaagatagcagagttgacacgcagtactccctttagaattcaagtattcctccactctcttgccaaacttaatcgtctctcctatgcagaaggagtcaaagcagtgacagggtgcggggatgtttacaagtcgtgagagggaggatatcagctgtgacattgagactctgttccaatgcagggttaatttgctgttcattttagcatttacagccagacaagatgaaaagcaagcaggaatgcctattatatttctattaaatgaatctgttgggacctaatgttcttgattagcttttgaaaatgagtgctctgcaatgcattttctgtttacctaaagtaaacagagaatgaattgtcatttatttagagattcaaacactccttttgaaaatgaagctttatgagggatctagctatgttgtccctaaatgttcttttcttttcaattgcattaaagcaaaacatttgctccaactaagtgaaaacactgaaagagaatgaggatgctcagttgttacattttgaggtagtctaatttctgtttagttttttggccgaccagctctgccaggtctctgcattaggaaatcccacatgtaacagtctttggatttagctctgataccaactgttcattaaaaacaaagtgtccaaagagcagaagagacaaaaattcagttcttacccattctagccgcagtagctacatgttgacagcaagaacctccttttccccctccacagtctgcacagttacaattacactacttattctgtgtgtgtagtcccttgaccaacagatccacaggcaaatttgctgcttataaatgtaatttttttctgaaattttaacttaacttatgttttatcttaggactcttaaacttccaggactgctagcattacctattctgaggaaactctttttgttcatttcggttttaatgtgtctctgtaactatgattattcagcagaagaccacagaggcccttatgctgtgttttggtatcagaatgctttggggtagcttacttctttttagagaaatttgcaaaagtaacatgccatatttaatttttgtctatttgttggaaaaatgaacatgcttgagtcctggttgtggtcagtttatactggaggaagcaaaacatatatgtgaacatcgtttttagctgtctttagagaaaatagatgttttgtcattgctgtgcttaaacacattgttgtgttggcagtagttttgagcaatttggtacaatcttcgtccttccagtcactgttagaaatgctttattttggtcagtatactttcctgtgataaaagaaaaggaataaaaagaaaacataagt

SEQ ID NO: 58218 - DNA, 2424 bp, Homo Sapiens
agggtatgttcatatttctgcgtggcctccactctagttatatgctgccgcataatagaataccccaaaacttagtgaatttaaacaacaaccgttgtattataactcatcattttttggatgagaaatttgggcaaggctcagctgaatgattcattaacaacagtcagtcattggaattcatctggtagctgggcctgtcttgagggtttaaggcagctttactcacatgtctggtgccttggtgagcaacagctggacaactggattcacctgagccctttggcctgccccatattctctgggcttctccagatgatctttttctgcaggatggttagacttctcatatggcaattcaggactccaagataccaaaatggaatctcccagtcctcttaaagcctgctggcacagtgtcacttcttccatggaccatctgagattcatggggaaaggaaatacaccccacctttcaaggggaggaatttcaaggagcttgtggccatctttaatctgttactacctcctaactggtcaccctgcctcaaatcttttttcatactctggccatatattcccaaaatctcaatttcattctatcttcccccttctcaaaaacctaagatggcttcctctagcctatttggtttaaattcctctccctgacattcataactcattatataaaagggtcctactataataatcttacctaattttgcattagtctctgtttgttaatcattagtctgtttgtcttacatagtcctcgccttcccctactctgttctgtatcacagggaagctgacccctgcaggatgtttttcctaggctccttgtcaacttcagactgggcctggcaaataggagacattggtgggagattagggggtggcagaagtcaagttatttctccttctctctgcttcatgcagatctctggaaatgattgcatttttatacctcctgtgctccagatccaactggttaagccttctctagttccatcatcctctgagtgaccctggtttctgagctccagaaactctgtattctcccttgtcattccaaccaaagcattgctgacagcttcctgaagttgctcatctctaaattgctatactgtctcctgttcatcatcccaggctttgatcacctttaaagtaaattccctgtattaaattccttctatttaaaataaactcaagtagtttctgttctgattagatcccagctgttctcaacacaaagtatccactccaggctgggcaattttgtacctggcccttcagcccctatgtgcctgttatggtatttctggcctggacctctggcctcattcttcaaagcccagctcaagcttcatcttcctcaaaatgcctttcagcatcactccagtttttactcacctgaccctatcattccttggtgactttcaatgtgtctgttttcccagtttgtaagttcattgaggaagcttgtacttgaatcctattccccacagttcccaccacagtgccaatgcacacaaagcactcaataaatattgcttatttgcttcaatataatatcttttaggtctgactaatttctatgagacatcagggctaaaatcatctgtactcctgaatggagtgaatttagggatgcttttttgggttagtgatactcttaagtttttcccatcctggatgaacatgttataatagacagggagagactatttttgttttgcggtggcaggtagtggctgttaggcacacagtataattcagtgtcctatatgaagtagatatcaaatatgaaatgaaaagaaaaagcctacaccataactgatggatttgtgtggaaaagccaatgaaaaaaatatttaaatatgacagtctttttgatacttttataaagtaccattaattctggaattaaagaacaaatatgatctacatatagttaaataagatcataataaaggaaaatgccacagaaaataaatataaattaataaatctaaaatccagtctttcatgtctcacatttcttatgccctagatccatattttattctttttcccctgataacaagtgctggaaacatcagagattcaataaacattttaattgtttgaaaatatctaacagatgatgttcctgccatctagtcgcaaaattgtcttaagggattattttatgcaaaattgttcaatttgggggttttgttttgcaaaataaaatactaataagaaagtttgctacagtatttactgttttcaagccaaaaaaacatgtttatttgggaccagaacatggtccagtttgagttcttaagatctgctataactaactaactcagctgctagtatttcaagatgacatcagaagaagctttgcctttttttgcgaaaaaaaaaaaaaaaaaaaac

SEQ ID NO: 58219 - DNA, 2356 bp, Homo Sapiens
atgcaagattaattcacagtcgattaaaaatcactgagcactactcaacaaagcacatcaataattttactaattgttcaaatcattaatcctaaaggagctcatcatgatagctccactaaaaacagaccttctacaacagcgaagccaactgttaaccattactcttacccttgtcctgacccaaaatcatctcttctgtcttcacctgccttggaaatgcaacatctccactgaatatttgattcagacttggctctttaagaacaatttctgtgcaataagtagcacaatacagggataggaaaacaggtttatcctactaacttgatttgagcaaatgatttaacttctatggaagccagtctcctcatttgtaaaatgaagagcagtggtgaaggatgtagttatataatgcaggtaaagtgcaaagccccaaacccagcatgtatcagggacttaacctcatccatttgttcaccaatatttactctgatatttattcatccctctgctgtaattactgtgctagacactgaggatgcagcagtgaatcaggcaagcatcctcccctcatggagcttacagtcttttggggtatacaagcagtaaatatgattactgtaaataaactgctatgaagaaaatatgccagggggtatgctagtaactgaggagatgtggcctgcattgaacagcatggttttggggaaggtgatctgagccgagacctctcaaagataaaatgcccctttctagtgaaaagttggggaatgggcaagccaggcagagagaataaaaagtgcagaggcttaaagacaggagaaacatgtggtagcccaggagcagaaggaggctgagtggctacagtgttatgagagagtaagccaggagcgcctgtgggaattggcaccagagaggtcctcagaagccaggtcttcaaggtcatggacacatgggaaggagggatttggaatttactgcaagaacaatcggcagggtttcaagaagccagggtcagttatgggctgacttgcagtcttcgatgtggaaaatgttttgctattggcaaagtggcaagggggaggccagttaggacactattgcaataggcaaggcaagagatgagaaaggattgaatgggggtaagagcagagagaagtgcgcaagatccagtgcatgtgctgagggaagaccggcaggacttgcgtagttagatgtctggggaagaaaggattcaggatgactcccgtattttatatgtccgtagtttgctctccattatgataacatctcgggctctttacttttcatgccctgcttcaggatcttcgcacctgatatttcctctgcacacaatactcctctagatgttggcatttccttcgatatcttctcaaatgtctcctaatcatcctataaaacagcaccaaccctctatcccaatcactctccttgccttattcatcttcagagcatgtaactacttgacattggttgatttgtctgtaattgtctgattcccacagcagaaatttcagctccgtgacagcaaaggttttgtctgtctgttcactgttacagccccataacctaaaaccatgtgtggcatatatgtcttgaatgaattaatgagaatacaagtgaatgaatgaaatgctttgttgctatagatcttgtctacagatgactacctttctggtcaaggctttggacatctcttcagtcatcagacagagtatctctgctctagacctcgctggagttcaagcttgaattattatatgcaagttaattttacaagcctggatgaggctactgaaaactggaaaaaagctacaagactgtaacaacccttcattctttttcatttccaaagctctctccccatctcaagctagaaaatagtgtaaccagactacacaatggaaccactcctaaaaaaattaatattagcctctcagcttttatctaaatgtaccacagtttaagagccttgtaaaatttgttccacaactttactataggaaaccttattatagaagggacaccacagaactcaatggcccacacatcaaagtcctcgagtttaggactgaagaaaagtctgcttttgtagaaaatgtgtatgcttcatgttctcttttaccagacaatgagaataactcatactgattcctcatttttccttgacttccaggaatgtctgtgataaattcaggggacaattgcgagaattatcctcagccataagtccctcacatggttatcacctgtccattatgtatctttttgtccttcattttaacatttcttttatacatggatcttaaaaaaaaaaaaaaaaaaaaaaaaa

SEQ ID NO: 58220 - DNA, 2283 bp, Homo Sapiens
gtggggcccagacccgcgcaaccaggcggggaggggaggtgggcgcgcgattgggttgcgatctggagcagtggggacaggtcaggaaccggcgcgtatttctgcagtgagaccacaggacggacatcggcgccttcggcttcgatggagttgcgattctgctctttccagggaaacagtggcagggtgtttgctgcttatcggttcctgcggatatgcctgggtcccaggacattccactggaggcttggactgcatttaggagcccctatcccttccctgtccacactgttagtgagcaatttcatatgtttgcatttagacccatagactcagaacgactcatcacacacacacacagtgtacactgacacactcacattcgcacacttaggtatacagcctgatccttgctctgacctggtaacaacgcttcctcctccagagactttgagatagagcgagcgatccctgtgcaccattcatccatgctcccacctcgccagtatggctggcttagttctggaaggggcttaagaggaacaagccccagctgtgcttctggctgggacttaaaccccccttctgggccctaaagccacgcttctttgtggaccggacctgactctccaggaatctgggaacccgctatttcactctattttgggacaagaaaaaggggctctttggggccacttcctgccttcccctcaagtaggatctccagcctgcagagggtgcctagtccttctttgcccaagaaccagtccaagaagcctttcctctgtgcctgggaaatgcaaccttttcttgggagcatggtagggtgttggtgctgaagaaccaagcagcgacccgtcttgtagctgccatgttttgtcgaggggttctgggggtcctgctgctttagagccacatacttccacttcctgattcactactgtgagctggtcagatgcctagaagaggaacaagcgttcaaagtgaaagtgggcacattaccggaatagtgctggggagagtgctggattcttttccaccccaggcggactggtgagaagccaggcttggacctgtcctctgctcctagcttgcacactcagccctaaactcagagcagcacgcataccacccctcacacacaccccaccatctgctgtctaaggcccctgggcttcctgcaggatccagaccaatgtggctgggcttgggcttttatctgtcctgatcctggatttgtcctgaccaatgtaagtgtcgcccaataaaaccttctatgacccccacaccagccacccccccaccaagtgtgccctttccttcttgactttttagcagttctgggtaaatattgatttgcccccagtttaccttctccctgactggccatttgcagactcaggaactagcctctgtagggacttgatttttctgttactttctggccgtttcaccaccccccttcctccctccaagtggcattgtaaaactcacagtgacaaagagacagagtagggttctaggcccctgttcctggggacttgaaggcggttttacatactggtcagacacggctggaggccaaggtcaagttgaaagttgcagtccagccagcatgagaactgccatgcgagcgtagagacacaggcagcagcaaaaggcccattgcccacatcccctcactcttaattttctctctctttttaaaattctcgcctctgactgttcggctgcccagaattttttggtgccttcgtggggtttttggggcggtgtttaccgactcttctctgcctccgccctgctcagccagggctttgagcctcttcggttttccggccagacccggaaaaacgaaaacacagcttggggagcccccactagccggcgcctgtgccagctcacctctggccatggcgcagctgccggtgcacacggcggccaaggccagctccacattcttccctccccctcccacttcaccgtagccccgaaccctgcgcgcagagaaagggtctcagctccacagacgactgggtccctcctcaccaaaaatggtgagacaagatttcatctgtcggccgaggagccacaagcaggtttgtctgagagggatggtgctgggggaaggctttggattgcatctcaaattaagctttgctccttaaatgtggcgctctcgccaagaaaaagcttggggcctgaattcttgagatttatggtgcaccttattgatcaaatttatctggactttttttagttccccgatgtgtccctatcatt

SEQ ID NO: 58221 - DNA, 2270 bp, Homo Sapiens
aaaaatagctaggcctaggccgaagaccaagaataaggaaggcagccagaaagctaaaggcaaggaatggggagtcgggtgtggctagatcagatctcccccactgccataatattctcactgatataatttttgcaaaggcgatttcagggtgagaaaagggagctagggaaggagcagtggacttggaaggtagacctggtggtgagttcctgttagtaagaaagcccaagtaattctactaccataatcactaatattattgctgctactactagctaacctgtgtgcaaaactctcttctaagaatgcacaacaatcctagaggaaggtgttattttcattcctgggtggcaagtgttacaaaccttaggcactggggagtcaactaattcgcctgaggccacacagcttgtatgtggccaaccagatgtgaacctgaataatctgatcctagaggcattgttaaccactgtgcctctcacacagtgaaatgtttccagaaggtaagggacagtaattctgaatggctggcagtcctccagcatgtggtcttcagcctcctgtctctgttcatgccgttcatttgctttagtggcctcttccacccacccattccttcacctggctgactccccatccttcagggcattctgcccagcacacctttccagaatcctgctgaggcccttacctcaccagcttgtggtgggtaccctgttataccatctgtcatagcgtttacctcaacacagttgcttttctgccttgtcttaaaaccttggatccttccattctttcatccttcgcattcaatcagagggcacagctgatttgacctcttcagtatttctaggtccatccttccctcagttcctgctgccagtgccctacttctcacagtttcacttacaaagccccccgcagttttactttgtcacaccctttagccctatatcttgcatccggagctgcagccatgccaactaaatattgttccagccccaccccaccctcaaccacttccccagtaggctgcctgtatatctattcatgcttgtccatatgcacctgaaatgccctttcctccccactggtgaagtcctgcttagttttcaaggcagcattgctgttgcttacactcagaggccttgggtgggccttctcttagatatgccagcattgtgcactcataacaccctatgccgagctctaccaaagggctcaccattataccgtagtccagtctccctttatgtttctgcctcccccactagatatgaacttcctgaaggtgaggactggcagattccacccaccttgtgtgtaccatgatctgtgtgattacttactatgttcctggtatttttttccttccctgttttgcagcagatctccactggttccccggaagctttccctgattgcaaaagttggaatgagtcattcttttcttgtgttaccattgaaatctgtagcaatgaaatcacctttctgcccagtggatgtgagcttctgaaggcaggaattgagcctttgtggctctctagaacccaccacaggcctggcacattgtgtatgttaaacaatttgggatagcctaaaaagtaatgtttaatgtttgtgctacataggcctattgttcagctgcatgaattgagtgaataagaaaaataattactctgaaggcctgtctttacttcctctcatagccctcaatgaagcaagggattttacaaacaaaacactaaaggccttggctatctttgttaatattaataacaatcggtctttttaggcctgaacgtatgtgcatagtgttcttatcactttcagaaaaacattcctccattaccatctgagggtaacataatcgcatgtgtggcaagtcatcaaattagtgaattcttaaaagtccaagttattatatctttattaggcagatttccacagatttgtgaggtcttcgatgtagactctgagactgtgattcatagttcccatgacagcaaagtggggatagctctctgagccacctcgggccacgaagaggtagtttttagtgggtaaaaatcccatacttctgacaagtgatttgtcagattaatattctacaccagggttgtccagtcttttggcttccctgggtcacgctggaataattgtcttgggcaacacataaaacacactaacaatagctgatcagctaaaaaaaaaaaaaaaaaaaaaaaaaaaaaaaaaaaaaaaaaaaaaaaaaaaaaaaaaaaaaa

SEQ ID NO: 58222 - DNA, 2203 bp, Homo Sapiens
ggcctttttttttttttttttttttgagatggggtctcgctgtgttgcccaggctggtctcagacttctggactcaagtgatcctcccaccttggccacccaaagtgctgggattataggcataagccaccacgcctggttttggaattggttctttatctttgttctgctgctgcgtggcgtgatgttcaagagcaaaggacaacacaggggaagccagtgtcactggcaccacagccttgagcccatctctctagccctctgcaccttatttcccatctgtgaaatgcccttaaacaccccttctaattttaatattctgagtcaaattgagctcaggtccaaatgccaaatattgctgatattcatccactttttgacccacaaaagtggtcattttaacctacaataaaacatcctggctcggtggctcatacctgtaatcccagcactttgggaggcccagttggggggattacttgagtccaggagtctgggaccagcctgggccatatagcaagattctgtctctacaaaaaattaaaaaattagccatgcttgtgggcaagcccctgtagtcccagccacttgggaggctgaggtgggaggatcacttgatcccaggaggtggaggctgcagtgaactatgactgcactgaactccagcctgggcgacagagcgggaccctgactcaaaaacaagacagtggccaggtgcggtggctcacgcctgtaatcccagcactttgggaggctgaggtgggtggatcacgaggtcatgagttggagaccatcctggccaccatggtgaaacgtcgtttctattgaagatacaaaaattagctgggcatggtggcacgcgcctgtagtcccagctactcgggagactgaggtgggagaatcgcttgatcccaggaggtagaggctgcagtgagctatcattgcaccactgcactccagcctgggcgacaggttgagaccctgtctcaaaaacaaaacaaagcaaaaacaaccccaaagtctggtttccttattaaccccaagttcatggtccacccgaagcttttcaaatgtcagtcccggctccccgcgccccagctgcagtgctgggccctatcgtcaccctcgccctcccggctccctgcgccccagtgccaggtgctgggcccagtcctcacccttgtcctcccggctgcccagcaggcggtgcgggcggccagacaggcggctgacttcgctctgaaggtggaagtggaatgcagcagcctgcaggaggccgtgcaggcagctgaggctggtgccgaccttgtcctgctggacaacttcaagccagaggtaaggtgggctctgcctccggggagggatctgtggtgggctcttacctccccttggcttgtgtcccgcaggagctgcaccccacggccaccgtgctgaaggcccagttcccgagtgtggctgtggaagccagtgggggcatcaccctggacaacctcccccagttctgcgggccgcacatagacgtcatctccatggggatgctgacccaggcggccccagcccttgatttctccctcaagctgtttgccaaagaggtggctccagtgcccaaaatccactagtcctaaaccggaagaggatgacaccggccatgggttaacgtggctcctcaggaccctctgggtcacacatctttagggtcagtggccaatggggcacatttggcactagcttgagcccaactctggctctgccacctgctgctcctgtgacctgtcagggctgacttcacctctgctcatctcagtttcctaatctgtaaaatgggtctaataaaggatcaaccacatggggttctgcggtgataatgagcacatagtgaggggtcagcaaatgtcagaagttacctgggacagccgggcacgatggctcacacctgtaatcccagcactttgggaggctgaggcgggaagatcacttgagttcaggagtttgagaccagcctggccaacatggtgaaaccccatctctaccaaaaatagaagaattagctgggtgtggtggcacgcgcctgtaatcccagctacttaggaggctgaggcaggagaatcgcttgaacccaggaagtggaggttgcagtgagctgatggtgccactgcactccagcctgggtgatagagcgagactctgtctccaaagaagaaac

SEQ ID NO: 58223 - DNA, 2187 bp, Homo Sapiens
catcagcccagcctgcaaggaggcgccaccggacctgcacactcaggagcagactcagctagattggaagagaggatgggaagacaatggatgacctacctgtggagagaaactacccattccagaacctcctctctgctgaaagctgaacactcaatgggaagacctgtttgcagagaggagccagccactccagggtctccgttctgctagaagctgaacactcgttgggacacccttgctgtggaaaggacatccttactgtggaaatgagctactaactgcaggagctgaggagctgcacagcaaggttaaaagagctgtaacacaaacagggctgcaacatgccccttgctccccacagggagagaagagctctggccctcggagaagcccagacctgggagctccttgagcccgggctgtgactccctctttggggccctggttggcgtcactgcattcgccagtgccactgttggaagctgcttgtgatgcgcctggtccagggggaagctgtttgttgtgtgcctggtccagccacctcatggagagcctgtgctggcacctggagctgcccaacctgggcagcagcttgtgtgtgtgactgcacagtggccacgcttgctcacacacccctagcacacccctctgctccacccgtctcaatctcccttggatccgggatccaggttggtagcaagtgcgagtgggcagaagcagcccagtgggcccagagcaaaactcaggcaaaggtgccactagactggccaggaaagcgacaccctaaagatcccataatgctgatatgttaattctattctataagcaccacacagaagtgatagcttttatttcttattttgtctagcctggagacagagctaaggattccttgaactgcaaagtcttttccagttcttagtttatacaatccatactcaccttctgcctaactaagcattgtcatttttgtgccaaatgaagagtaggactcctacgattgtcctcagactctcttggctcaatcctcctgctttaacctttcctacttcaaaaactcctgaagttttgcttccccttctatagaatggaaatatatgtcgcaatacttactgcaaagaaaattatatattttaaaaatagactaaagagatgttgtgagacatcagacatcaatcagatgttgtgagaactgatttctgcatcagaatatctccttgactttacagctatcctttaatcctggctcaaagttccagaagaaagatgatccaatataatactcctatttggactttgagtcatacacattccttcttctgagaaaacgtgcttctgcatgaatcctcccttcattattttcagctcatctattattgaatctgaaaccccaggttaactgactgatcactctcatcagtggcagattttggtgtaacataggacacatcactcccaattcaggtcaagtcccaattatcttgcctctcaatatgacatgttcaatgttgtatttcattctacttcattttaatgtaaaaagtcttttctggtgaagtcagtcttttattttctcataaaaattcaccctttgggtttttcatagggtattcccataaccaaacacactttacactttcctagtacataacccaatactttcttctttccccacagtccttacatgaagcctactcagaccgacatcactgtatcatttttttgtattctgaagtccttcagcacttgattcctttaagtttaatcttggtattctattgggaatcatatggaaatgtacaatgatatttattgaatgaacaggaaacagggaaagacattgaccagaaaaagtgtttattcatcaagtctttaaagatacaaaaacacgtgtcttctgtggagctctgagaacaggactccagcaaagcacttttcagccttgtggtcttcaagcatttccaagatctgtgacattggaaagaaaaaaaattaagacagatttgggtctccatgagcagagagtattctttcccttagttctgggtagcatagtgcccaaggaaacctaatcagtacagtgggaaaccaaatctattccaaatcattacccataagcaatcctatggactctctgaggtttgacagagtcagcggccctctccaataaatgtgtttttctat

SEQ ID NO: 58224 - DNA, 2162 bp, Homo Sapiens
cccagattgcaccactgtcctccagcctgggcaatagagcaagaccctttctcaaaaatgaaaaagaacattctggagagacagagaagcaagagggaccagaaaggtgcttgagatattttgcagaccctgcacttgatggatcagctggcaccacccagatcaataaactggctcatctgatcttgtggcccccacccagaactgactctgcaagaagacagctctgactcctgatgatttcatctctgaccaatctgcactcccagatcccagcactttgggaggaccagacaggcagatcacaaggtcaggatgagaggtgacagcgtgctggcagccctcactcactctgggcgcctcctcggcctccacgccaactctccctgcgcttgaggagcccttcagcccgccgctgcactgtgggagcccctctctgggctggccgaggcgggagcccgctccctctgcttgccagaggtgtggagggagaggcgcggacgggaactggggctgcgggccacgctcgagggccagcatgagttccgggtgggcgtgggctcggtgggccccgcactcagagaggccggctggcgccattggccccaggcagtgaggggcttagcacccagaccagcagctgcagagggtgcgccaggtcccccagcagtgccagcccacaggtgcacttgaattctcgcaggcctcagctgcctccccacggggcagggcttgggacctgcagcccgccatgcccaagcgtccccctgcctgggctcctgcaccgccccctgctctgcggggcctggtcccatcaaccgcccaagggctgaggagtgcaggcacaggattggtgggcagctccacctgcagcccaggtgctaggtccactaggtgaagccagctgggctcttgagtctagtgggcacttggagaacctttatgtctagctaagggattgtaaatacaccaatcagcactctgtgtctagctcaaggtttgtaaacacaccaatcagcaccctgtcaaaatggaccaatcagctctctataaaacagaccagttggctctctgtaaaatgggccaatcagcaggatgtgggtggggccagataaggcaataaaagcaggctgccagagccagcagtggcaactcggggtacccttccacataggaagctttgttcttttgatctttccaataaatcttgctgctgcttatcctgggtctgcactgcttttatgagctgtaacatcgtgaaggtctgcagcttcacgccagaggccagcgagaccacgaacccaccagaaggaagaaactcggaacacgtccgaacatcagaaggaacaaactccggacatgccgcctttaagaactgaaacactcaccgtgagggtccgcagcttcattcttgaagtcagtgagaccaagaacccgccaattctggacacaaggagatcgagaccatcctggctaacacggtgaaaccccatctctactaaaaatacaaaaaatttattaggcgtgttggcggatgcctgtagtcccagctagtcccagctactcccagctacttgggaggctgaggcgggagaatggcatgaacctgggaggcggagcttgcagtgagccgagattgcgccactgccctcaagcctgggcgacagagcaagactccatctcaaaaaaaacaaaacaaaaacaaacaaaaaaaccctctgtttcccgaatgctcagggagactgatttgagtaataataaaactcctggctggacacagtggctcacgcctgtaatttcagcaatttgggaggccaaggccggtggatcaccttaggttgggagtttgagaccagcgtgaccaacatggagaaaacactgtctctactaaaaatacaaaattagccaggtgtggtggcaagtgcctgtaatcccagctactcaggaggctgaggcaggagaacctccgcctcccgggttcaggatattcttctgcttcagccatccaagtagctgggattacaggtgtgtaccaccgtgcctggcagttatgtgtgtttccctacaatcaaacaatgatttattgtaaaaaaaaaaaaatcaaaataaacaaaacctgaaaacttggaaaaaaaaaaaaaaaaaaaaaaaaaaaaaaaaaa

SEQ ID NO: 58225 - DNA, 2137 bp, Homo Sapiens
gtgtattacaagcttctaaatactcttgcagattacttggctaaggaactggaaaatgatttgaatgaaactctcagatcactgtataaccacccagtaccaaaggcaaatactcctgtaaatttgagtgtgcattcctacttcattgcccctgatgtaactggactcccaacaatacccgagagtagaaatcttacagaatattttgttgccgtggatgtgaacaacatgctgcagctgtatgccagtatgctgcatgaaaggcgcatcgtgattatctcgagcaaattaagcactttaactgcctgtatccatggatcagctgctcttctatacccaatgtattggcaacacatatacatcccagtgcttcctccacacctgctggactactgctgtgccccaatgccatacctgattggaatacactccagcctcatagagagagtgaaaaacaaatcattggaagatgttgttatgttaaatgttgatacaaacacattagaatcaccatttagtgacttgaacaacctaccaagtgatgtggtaagtatgaaggctattcagtggtgaacatatatgttttctcctggacctctgaattactaagttatttttcccacttttaatatctgaaataaaagggttgggtatttgcatggggtgtgagagaaatcaatgttgattctatatttaatatttttaccttttagcagttgagattttgaatggaacatcatattccttattgtaaaagtaagatcataattaaaaagctagatgcattcattaggcagagtttctttaaacctaagtctcttcatctcatcttaatcattatattacaaagtaggcatttctgtctgcctagtggcatgtcttgcaaaagaatgagagagtttttgaaggcaagaagaagaagggggccaattatcggcttttgcttccctgccacctgccagcgcttttccttttaattaatgatctgatgttactggtcaatataataagaaatgcttgtacagttggggtcagaaaattctggctttgatctccctcaactttctgaaacatttatttgttttctctaaattatttcagttttattttaatcttttctatcctgctgagggctgcaagaatgaaaacctacactgtttgtcatttgctttggcagagcaaagactgcttacttagaattctatttgtaaattaaactgcaaacccagtttgtcataaaagacatctgatccttttgaaatgacgaaaactgtcttttgtctgtaaaggctgataaattaagtgccagttctcttctggtctttgatcttgcggagggttgtgtgtgtgtgtgcgtgtgtctgcagcttataatgggacatattctgtatgtcacgttaaatagtctccaaaagtgcattatttttggccttcatattcctcagtacaggacaaaaatgcaaactagtactgtttctgtatatattttaatggctacttaaaaatatctttataacatagttctaagttaaaataacttcctttttaaaaaaacaaagcatttattctttatatggatattaaaatttgggaataaaaatgccttcagagcatatttttctgtaatattgaactactttgaaatccattattaaggagtttgagaaagtgaatttaaaaatcctaaactcaaaaatacactaataccagccttgattgtccttctgtctaatgataggaaaaatatgattttaaagtcaaaatcagattatttatgcccataataccgtaaaatacttgctgaccttgagacatattaaaattcaactaccttatcttactgtagtaaaacttatgctatgaatgtacaaatctaatcctaggccagtgaaaaattacatctttttagctcattataactagattacctcattataaaatttttgcaaaaacaaaatcacaaagaaattattagagttactcatttaaaaactaatcaaagtattattcaatggatagagaaataattatgaaaatagaatcccaacttttaagaatgctttccttatatgcatgtacttcctaccgttaatgccttagggagaaagattgttaaaaagaaaaaaaaaaaaaaaaa

SEQ ID NO: 58226 - DNA, 2114 bp, Homo Sapiens
acttcagccagagcgcggggttagggcttcattgccttgtgtcctctgctccgggagacttcggtgattctgccactcactccgtcgctctgtgacctgctggcattgaatgatttatagctaagactccaggacacccctgaagccgagaaatggaactcttaacattcagggatgtggccatagaattctctccagaagagtggaaatgcctagaccctgcccaacagaatttatatagagatgtgatgttggagaactacagaaacctcgtctccctggtggaaaagcgagattgtctttgaccatttgctatggacattgtcagggatggtgcagcctgaatgagaatgtctgcggtatttcccgaaataagtatccctcaaggatgatactgtggacctcactcaggaagaatgtgtccttcagggaaagctgcacagagacgtgatgctggagaagcagtcatctggttactttagtacatgacttcaggctcctatgtgcagaagtcctcaacccccaggctgcagaccagtacctgtccatggcctgttaggaaactggccgcacagcaggaggtgaaatgattattgcagtttcgaggggagatgatgtcacaagatctcgaacccatatctcagaaccgcctgcctcctcccacacactctggctgtcctgaccatcacttcaagcccaccagccctgcagcaaaaaaaatcaaacgagtagttcagaaggcaaagtctgcaagggaaggaagtatattgggaggtacagtaagtattcctgtctggagaaggtcttctttggggctagaaactgagccagtgctaaagccatgcaggaaggaggaaataatcagtgagccacgggctgaacttgtggaaaagaaatggagggcaaggtcacaaaccagtccctaactgcttctaatttaatgtaatcctcactgtttgtcattattgcttttgatggccatgaaatctgttttttcccagttctctagtgtaatttggaattaatttcccagctgctttattttttttctagaagagtcggggacattttcaggattagtagaggtgtttctacaacaccttcatgccttcgatagtgtgtaagagttcaccaattgaattaccttattctgttcagaagtagtaactatggagtttaaccactctggacatattatatacttaatggagaccatagctgtgtggtgactgaaaacatgcattgtctactccttatggtgagactgctttccttcatgaagtcagtaaagaagggtaacttttctgtagatttttgtatttttaaaaaaggtcaagatcttcggcagttttctgaattgaattgtttgtgatatttgctctgtttttaaaatcttctaaggccattaccaggttcagtgcttatcttagtacaatttaaattgattccgtgaataatttttcctgcctccagtttcccttttacatagtgggctcatgttttaatatgttaaacaattctgacattgaaataattttattttatatttttgcatccacaaatactaattttctccatatattaatggtgatgtagtttctcctctgcaatatttttttgcctactcatgttttatgtcccctggattacagcactgtcattccactgtgccctatttcttggttatgatgaaaagactcttaattccagtatgaaatcatttctgcattccataaatttcatttggcatctgtggaattaaggcatcttcattgtatttggatctctgaatcataagtgatatttgcctataaattaagcaatgatatttaaataagagattaccacaatcatattttataaatatacaaccatttttaaaaacctgacaaaatctacaaaaaaaagaaaatgaaatatatgtggagttttaggaaagactgactaggtccaaggttgaggcacatagtggttaagcacattgtcagctccggactctgcctcttacaaggaaggagggggctttagatgttatttagctgttatttagcctttctacacctaagttcccctcacctgtaaaaaaaaaaataataataaattgcttactttgt

SEQ ID NO: 58227 - DNA, 2101 bp, Homo Sapiens
agtgcgggccgtgaggggtgtgcgcgcttgagccggagcggggctcgcccctcgtcggctcccgccgcccagccggtgatcgctctccggccgtccccggcaccctcggccccccacggcggttggtccgggcgggggaaggagaaagtgagactcggtgtcatcaccaatccgtcgccagaaggggaggaaactggaatccagcagcggcgagcagcagctggacggtaacatctggaaatggaaagccgacctccccctcctcctccacctcctcctcctcctcctcctcctcctcctcctctcacccaggatcacttccaaaaccacttggccttcagcccctgcctcggccagaggtttcatttttaactgaatatttacgaaagctgaaagcgtgcgaggggggtggggtggaaatagcggctgcttcttttccaaggatttatttaatggggatgtgttcaaggcaagaccgaattcagaaggatatcgacgtcgtgatccagaagtccagagctgaggactgcctgtttgcaggctctgattgtactttctccacaagcttcagcatggcagtatctctcaccacttgttttggtccaagggcagaaatgagcatcctggaaaccaatcagtacttccgctctgaactggaaaagtgcaaacagaacttccaagacctcacagagaaattcctgacatccaaagctactgcctactccctggccaatcacctgcagaaatatagatacacgatcccttaattcaggctcaggctgaagaactgacccacttacgacagaagatacaggaagggagaggtgtctgctaccttttcacccagcatgtgaagaacacagtcaagtcttttgagggccttctcaggaacactgacattgcctactaccagagacagagattctgtgagcaaatggtacaaggaagccagctgacagagatccttgtcagaaaacttgccacagaaaatcacaatggtaagaaaaatgaagacaggcaaaagccactggctcccaggcacactttactcccagtcaaaagtggactgtatacttcctctttgatgtgatggtccctttggttttggtgcctcttccatgagcttcagatcagaactagctatgtggttccaggctgccttggtttaatcccttgtcttgcctacttcacctggctcaagagggaagtccaggaggaagaaatggatgaagtcctggaggactcactagatgaacagtatttgactcattccagctgccatgactcccaccagcttcccagcagcaatgccttcctctttgatgcacaggaaggccccttggctgtggaaatagccaaagatgagatccagagccagtggcagcacctgaaggagacccttttcatcaacaactgcctgtgagaaaagctagaacgtcatcacagcagctttgatgaagaaaatggatgcacctctaacctctacaggcaaatcatagattccattgtccagctgtataatgaaaacagagttctcagagaagaataccggagactcccccgacttgcctgaatcaaatttccagaggtaagtggtgaaaggccacaatatgaagtcactctcagatgggtctcttctcttgccacactccactgtagaaataaaagaggacggggaggccagagctgctcaaaaccttataacccacaattctcatagttactctcaacttagagagggctgctttctagacacaccccctccaggcccccagactgccaggctccaggaataagtagctctaagaaatacagtatttcagtgtgagccacaccccactattgcaaattggagaggagaaggacaaacttaaaaggtgaaaagatttaacagaacaacagggtgaaaccccatctctaataaaaatacaaaacttagctgggcgtggtggcatgcacctgtagtcccagctactcaggaggctgaggcaggagaatcatttcaacccaggaggcagacgttgcagcgagccaagtttgcgccactgcattctagcctaagtgacagagcaaaactgtctcaaaaaaaaaaaaaagaaag

SEQ ID NO: 58228 - DNA, 2099 bp, Homo Sapiens
ggcacgaggcacgagcttggtgatgaagtccttcagctgcgccacgccctggcgcacggtgggctgcagcggctccatccaagcctccttggccctggaagccggcgtgtccatgttgcccacgttctggactgcctggaggtgacagcaggaaggaccaggttctgctaggtttaactgacgctgctgcactggataccccaccccggtgccgggcacataggtgcagcctgagagtaagcagacctgggttggaaggtcccgcgattcaccaccgacaggatgggcggccttggcaacccccgacccctcgcaggcctgttcccttatccatgagatggaactcggacaaggtggccacaggaagcctttgcaaactgtgaagtgcagtgcctacgtgggcgtgccagtggcctcgccggagccggtagggaacactctgcagtccaggccagggccccggtaggacacccagctgtgcatcccgcccgtggccgcaaggcccgcaccttggccaacaggagcagggtgcggctggtgcgggcgtccgcgtggcgctcccgcaggtggaagagcttgggcgacatgatggcgggagagaagaagcgcaggcacaggaagctggtgacggcgatgaacggtacattctggaggggtgcggaagagcgcgggctggagtcccccagaccagggctcctggcagccccctccccttaggctccgtccctgaccctcgccgggacacagcctccctggtcctccccagcgctccctggttccccaccgctcttcgcccgcccctcgccccagcccagtccaacccggcccagcctagcccagcgggtggagggcgcacctcgtgctgggcgccggggaagcgctcgcgcacgcgccggaagagctggcggaaggtggcgcgcaccacggcggggcacgcgggaaccgagcggctgagcgcgctcagcagggcccccaggtgggcgcgcagcgtctgcgcgctctgctccagcacctcggcctcggtctgcgggcggtgcagcccggaacacctgcgtggaacggggcgggttggcagaggaggtcacggtcagcgccagggccacgacaggaacagtggctctcacagcagccgggacacggacacaggggacaatacacgggtgggcagaagcacaaacacacatgctgacagggcctgatcccaacccgctgccgctgcgccccgcacccccccggagttacccccggcctcaccctacatccttaacttccactttgctggggtccagctccacgtacttctcctcaaacaccttgttgatgatggggcccaggacgccgtgcaggtactgcatcccggccacctggggaccaccgcaggtcacattgatcctgtctcccccagtcccactccagctgcccaccttctcccggcagccgcccttgcaccgtttgcctgccgtatccgcccaggagggggacaggtacacaagcagggcaaactgtttattcatgaatgaatgaatgagtgagtgaatgaatgactagaattcttagcccttgtaatcctagcactttgggaggccgaggcaggaggatcacttgaggccaggagtttgagaccagcctgggcaacatagtgagactgtctctaacttaaattttaatcacacacacattcttttgggggggggggtgcggggcacggagtctagcacggggcccaggctagagtgcagtggcgtgagctcactacaatctctggcttctggttcaagtgagtctcctgcctcagctactcaggaggctgaggcaggagaattacttgaacttgggaggcaagggtttcagtgagccgagttcgtggtcactgcactccagcctggctacagagtgagattccatctcaaaaaaaaaaaaaaaaaaaaaagaatgagtctggcccctttttgtctttctctcatcctctttgcctttcaccatgttatgatgcagcaagaagcccctcatcagatactagtgccatgaccttggacttcccagcctccagaactgtgagaaaataaatttctgttctatgtaaaaaaaaaaaaaaaaaa

SEQ ID NO: 58229 - DNA, 2086 bp, Homo Sapiens
agaggcctcgcgaggcagggctagaagctgtggcctcacccttgaggcccgggcacttcccgtctcctcccttgctccccttcctcaccccaatccctacagcctcccgcgcagcctgagctctaggattgtgggttttccatcctccgaagacatcacctttgctcatctcccaggagagtctcgtccaaaggaggggggtgctttctgcttcagcagatcccaccccaccctgggatccgagggagcaatggtggggcgagttagggtctgccgtaaatatcccccgaccaccctctgggaaggtgctagaggccacaggcaaatttcagtctccccatggaatatctgctgtgctgctgctgctgctgctgctgaactcttagggtcacctggagcaccttgggagccagagatgcagccaaagagtgaacaatggtaccaatcccaagacccatgtgttaagaagaaaccagccaagactcagatcaggattggggagtccacccctcgtttcccttcagagcattatttccttgtttgctaagaggggcaggaactggaaaactcaggctagcccatctgagaagactttcctggagatgagctggaggagggaggagtaaggccttggaaggaaactccaggacagcaccacctcccctacactgggacctcgtctctaactggcagagtggtcaatgaaaaaaagggcatgccttggcacatcgtggtcaaactgctaaaagccaaagacaagagaaaatcttttcttttttttaatcccatcctaaagactagacagaacaatattttcaatgtcactcttttctcatcaaaaccaatatagaccagaagacagtggaatatctctaaaatgctgaaggaaaaaaaaagtcaactcagaattgtttttctagtgaaagtattcttccagaatgaagatgaaataaagctattttcagataaaagaaaacagagattcttgtcgccagcagacctccactatgagaagcgctaaagaaagttctttaggacgggcacgatagctcacgcctataatcccagcattttgggaggccaaggtgggaggattgcttgagctcggaagatggaggctgcagtgagccatgacggtgccactgcactccagcttgggtgacagagtgagacgctgtctcaaattggaagagcagagctgcagacaggaataagaagaacggtaaatttgaagatgggaccgtctagttgcaagaaaacaagctcagggctcccactgattctacattacgggctgtgggttccttgagggaggaattttgtcctgcaggctgtggcagccctaggactcagcacatctaggtgtccacctgcgtctgtggaagaagaagaagaagaggaggaggaggaggaggaagaagaaagatggtgagatatcctgcaggagaccagggccaggagggtggaggcctctcaagaagagggaagcatgaggaagctccagggcaggatggtttacctgcctggacagcaagatgatggctacactagcccccattctctgggcgcctggatttgcccaccagatctcctcacctcttgcccttcacctcctgctgtacctacaaggtctccccgattctcatctgcccataatcatggacacagccccaggatgtgcagggtgagtccccagggaccctgaaagcatgggtactcttatgactgagggcgttacaccagggagagggagccggggagacttcccagagagctggttgggggttatgaaagtggcctcacggctgatgcggtggctaacacctgtaatcccagcactttgggaggctgaggcgggcagattgcttgaggtcaggagttcgagatcagcctggccaacatggtgaaacccagtctttactaaaaatacaaaaaaattacgtgggcctggtggcacgtgcctgtagtgccggctactcaggaggctgaggcacaagaatcacttgaacctgggaggcggaggctgcagtgagccgagattgcaccactgcactccagcctgggcggcagagcaagattctgtctc

SEQ ID NO: 58230 - DNA, 2067 bp, Homo Sapiens
tattgctaagtggaaaaaatgcaattcgaacctagctccttttgcccatggagatagtgcttgtactcaccagtaatttctcaggatcactgtttgagtgaatgtgcaggtacctaggaggatacccaatagggccaaatcccttgggaaggatatgttgagaagagcagctttgagtacaagacaactttatgattttgcatggaagatgggccctgtccccacagagagaatttccctctgatgcaaagagcaaattataggcacccaacaaaccgtggtcatgtatgcataggtcactggtgggtggtaaatcttgtttctgggaagacttttgtaaccattacctctggaaaatctgaaatgatgataccaaacatgttgcttaccaaactgacctcttccacccttagaagcagtgagaaagttcagtgtcaaggactgagctctgcagcttctcttctgcctctgaaatttattaagtcagtaggccagaccctaaatgatttatgacacagaaagcactcacatggaatacaaatgtctcatagtgaagagcaagaccagttgtgattgtaagaaaataactattaaaatgtgagtattttaggagtatacatattgttgttaaggcatttctagtcagtaatgaattgaaggaggtaacatacccacactaaccaaacttagcatttgtaggccccatctataagatagcagagtcactgcctgggagtttctgaataattactgtctctaaatttttaaaacgttcacagaacaatctgtttaaatgccctttaacgtggttgattctggtgctgagtttagtctgaggactaccaaagcaaaataatttccctgcacatgcccaagtgagaaatttcatcctctgaatgaatggttataaaatgacttagcttcttctgtgtgggtgcttatatctagtttgattttgcctgtggtcagtgttctgatattattatatatacatgtatattattggaaaggagcataaaactttccttatataattccaagttaaaaagagacaaatgcttgccatgcattcagatgttcttacttcaagatttttcaaggtcttctaaccagagttaattgttaactttgtttcgtatcatgcattttttcaaaagctctaagtattgtagtgttctgtgcagctattactcaatatcatctctgtgtcccctttccctgtgctagccttggtgtctagaaggccttgagtatagtttgcttgtttaacagggtatacagaataggtgcattctagaaggttatctatcaaatctatttttctatagactttaacctctcatatcagaatgatgactggttctattgcctagttctggtaatagctctgagtagtccaaagatctttgacaggtatagttgggagatagtcaaggaccttgctgtttgacttttttaaagacctgattaatactctgtattctgattccttactccccgtcagaccataatctgagagaaacctcataacctggccaccaacatggaatggattgttttgtactgtaatgatggtcagatagggactaagaggaactagttttctttcatatgtaagtctttaccttctaactgtataaattgttagcaaaatgttgtataaaatattagaatttttcttttcgatctattttaatatgtgttatatatcataagggttttagcaatattaacatgacattctacatttttcttcttaccatataattatataaagcaacaaatatttagtggacattaatatatgccaggtagcatttcaattaagaaagcgtaagaggtaaatctagaaccagaatatttcttacagaaaatatcaggatgacagctgattttatgtgtataaagtgatttatctctctgtgctataaattacacccagaggtagtggtagtcaagtataataaagaccaaaagaagaaaaatttggaaacataaaaaaaagacataataggaaagtatttttgaagaaaaaaggcaactccagattaaaaaaaaaaaaaaaaa

SEQ ID NO: 58231 - DNA, 2062 bp, Homo Sapiens
tatttagaactgggaggtctgggggaacgtgtgctaggcttctgcttcttgaatctgcctagcagcttctccaagggattcccatttaatacagatgaaataaatttccccatggacaacctttgttttgtgggcctcatatccatgattgaccctccccgagctgcagtgcctgatgctgtgagcaagtgtcgcagtgcaggaattaaggtgatcatggtaacaggagatcatcccattacagctaaggccattgccaagggtgtgggcatcatctcagaaggcactgagacggcagaggaagtcgctgcccggcttaagatccctatcagcaaggtcgatgccagtgctgccaaagccattgtggtgcatggtgcagaactgaaggacatacagtccaagcagcttgatcagatcctccagaaccaccctgagatcgtgtttgctcggacctcccctcagcagaagctcatcattgtcgagggatgtcagaggctgggagccgttgtggccgtgacaggtgacggggtgaacgactcccctgcgctgaagaaggctgacattggcattgccatgggcatctctggctctgacgtctctaagcaggcagccgacatgatcctgctggatgacaactttgcctccatcgtcacgggggtggaggagggccgcctgatctttgacaacctgaagaaatccatcatgtacaccctgaccagcaacatccccgagatcacgcccttcctgatgttcatcatcctcggtatacccctgcctctgggaaccataaccatcctctgcattgatctcggcactgacatggtccctgccatctccttggcttatgagtcagctgaaagcgacatcatgaagaggcttccaaggaacccaaagacggataatctggtgaaccaccgtctcattggcatggcctatggacagattgggatgatccaggctctggctggattctttacctactttgtaatcctggctgagaatggttttaggcctgttgatctgctgggcatccgcctccactgggaagataaatacttgaatgacctggaggacagctacggacagcagtggacctatgagcaacgaaaagttgtggagttcacatgccaaacggccttttttgtcaccatcgtggttgtgcagtgggcggatctcatcatctccaagactcgccgcaactcacttttccagcagggcatgagaaacaaagtcttaatatttgggatcctggaggagacactcttggctgcatttctgtcctacactccaggcatggacgtggccctgcgaatgtacccactcaaatggagttttgcacttactgcccaggctggagtgaaatggcgcattctcggcttactgcaacctctgcctcccaggttcaagtgattctcctgcttcagccttccaagcagctgggattacaggcacccgccaccatgccgggctaattttttgtatttttagtagagacgtggtttcaccatgttggccaggatggtctcgaactcctgacctcaggtgatccacctgcctgtgcctcccaaagtgctgggattacaggcgtgagccaccacatccggccttcttccaacacatttctatgcatgtctctactctgctcacctttccatcccttgtaatgttttacacgatgttttatacaatgtaggcactcaattaatgtttaataggagacgttggcactggccttagacactcacaatccaaggtggaaatctcaactctactatgtattattctgtggccttggacaagtatggaaccattctgagcctcagctacacctgcaaagtctcaataatacactccagggatagaccttgcagagtgttgtgagatttacacgtagaaatgggcataaagcaccaagcatgcttaggtcatggtagatgccttgttactagtagctttattcttgctgttattaatgccattatagacataataacaaatgtggttggtattatctgtgctttcaaacactctgtgtacacattaaccataaaacttagcacct

SEQ ID NO: 58232 - DNA, 2052 bp, Homo Sapiens
atccattgcatttgcagatatgcctcaggattattttattagtacaatttttttttctttttgagacagtctcactctgtcacccaggctggagtgcagtggtgcaatctcggcacactgcggcctccacctcccgggttcaagcgattgtcctgccttattccctggtgtatctgggattaccggtgtgcaccaccacacccggctaatattttgtgtttttagtggagatggggtttcgccatgttggccgggctggtctcgaactgctggtctcaagtgatccacctgcctcagcctcccaaagtggtgggattataggcatgagccaccgtgcccagcctagcgtcatgtatttatactgttatttccacctcctaaaagtcaacaaggacacttagctcaagaaggctgatgttgagagagaacgcttatcagaacagggatctctgaggaaaaagggagcttaaatgtgtgtccctggaatttcttctagcccttcctttccttggtgacatggccactgctatgggcgggaattagagaagagccctgaccagtggtgttgatgtctttgccaagtatactgtcaggtcagtgtcataaattgatgatatatatagagagacttcatttaatagaaaataatattttaaggaccaccttgctattttacttctctaataatgttttgaatattttgataaatacctttagcaacatagtggttctcatctcagccctctctgtccttgaaagaatgttatttataacagggtggtttctggactgcccttctggagtaaaacttgggcattctaaccatatgcttgctggaaaccataataatgtaaaaagtcgtcattgggttttcaattgcaattacattgatataattttgtatataaaacagtctgttactgggagcagcattgttcatgtaagaaagatgttcgcttcatataatacatggaaacaaagttatattttcaatgttagccattactgtgacactccaaaaaaggctggtgatggggagaaagaagagctttaaaaaaacctacagacaattcacttgcctctcgggcttttctgctttgcctgccttgaccgaattagagtatctgcatttctgcactaagctggttgaggtttgctaagtcaatggtaatgttttacagagcttggctgttagccagcatttgtggaaaacgaccaatgtctgtcatagctagtgctataatttattcagttggcatattgtttatggagacagtgagataaggggattaggatccagagagactattaaaatatgtgagtccatctgttgtgatctgaggtttcattagagaaaacctgtctgctagtacaacaaatggagacttagtaaggatgtttttatataaaggattataaatcagcagaggtaaatacattaatcttggccaaacaggtcatgtccttttgcgttttcctgatggcaggttctgccccctgccgcccgggcactgttggtcatagcgtgaccttggcatcagctgtgagccggtaaacatggaaatgtaggcccctcccaacctgagtcagacccttagcctggggtccaggaaactgttttaacaagcccctgggtgattttttttcacatgttcaagtttgagcgcctcgagggcctgtgaatggttgcatataaggtacagctggccatatgtcttaaatgacttcaaaggggtgtgagccaggcctcttcccacaccagacttcatgaaccatgcctggtattgtcatgtttttgtgagcagccgtgaatagggctgggggagagagatgttcagccaagaaagtctaaaatagaaagggaatgttcagttataacaaaacaaatttttgtaattagagtgctgggttgtgctcagcatcattggagttaaatgtggagcagtggcttacacttgtaatcccagcactttgagaaactgaggtgggcggatcccttgaggtcaggagttcgaggccaccctgggcaacatggtgaaactccatctctac

SEQ ID NO: 58233 - DNA, 2012 bp, Homo Sapiens
actagctttcctctctaataatgagtgagcagcttcaggaaagtgattttgtttgcttcattcttgtacctccagcactagtatagtatttggtagacacacaataggtgctcaattaatcgtattcaataagagctctaaaagagtttagtggtaacaaatattaccattatggaacatctgcatggctaagtacctaaatcatcacatttaattctcccaacaaccccatcatcctacaggtgaagaaatggaagctcagagaagttgtggtgcctgttcaagatcactcagctggtaggttgggaagcaggattcatctccttcctgtctgctcttcatcaatgtcagtgtgctgctctctggcctgaaattcttaagttccagaaatcaagcaacattaacatacctaaattacttccatgatctactaactcactcacctaaattttagattcgcattttaggattatgataaaacagtggttcacacgaggaagtaattttgcctccaggcaatatttaacaatgtccggaaacatttttggtggtcacgacttagtgggggaatgctatttgctggtagagaatagggatgccactaaacatcttaaaatgcataggacagctccttgcaacaaagaattgtccagcccaaaatatcaacagtcctgaggttgagaaaccttactatgtaaggatagcatgagtacttgtactttaaaatacttcactatcttggtaaacatattttccttttccagtacagagaatgagtatcattatctctgactgaagatgaagaacagaaacagtgatttgtttatgacggagaagagagtctgccataaagtcttactggacccaggatggcctacaccttctcttctggctttgccatctctaaaactggcttttctgggatagagatctttgttccttggtctgaaatccaaatacatgatgcagaaaaagtgagaaaagtgatttaggaacaagtggttcgtggagagggctcctcattttctggataaaggcagtagctctacttagaatcacagaattaaaaccaagagaggcctcagagaccatttagccccccatcccactcctaattgtacagtggcaggaagtgaggtgtgagaactggaactatgagctcagtatcacctagtgagtggcatcctggatggaacttagggctcctggctttcagtttagtgcctttttctccatcccactttgttattcgactacactaggctaaccgaagagaaagttcttgtaatttcagaggaatcttcagctttttcttctgcaaatctgggatgacactctcatagtaaatggagaataactgtgctccaaacaagaatgctaggatttaggtatcaagagtattaggtactcaatcagaatgggatgccctctggacctgggactcacttaaaaatagaagtcagtgtttcaacagagatccttgctgcattatgaactgacagaaaggttttgatcctaacacagtgatacaggggggattaatagaagtgaattcaactgcagctaaggggttggtacagctcatgtcccagttgcatcctgtcttaccaaggaagctgaagtgacagatcctgagatttggccaagcctcgtgatctaattggaagtgtcagtaggattggacagataagaatacagctggccaggcgcggtggctcacgcctataatcccagcactttgggaggcccaggtgggtgtatcatttaaggtcagaagttcaagaccagcttggccaacatggtgaaacctcatctctactaaaaatataaaaaaaattagccaggcatggtggtgggcgcctgtaatcccagctactcgggaggctgaggcacaagagtcgcttgaacccgggaggcagaggttgcagtgagccgagattgtgccaatgcactccagcctgggtgatagagcaatatgcagtctcaaaaaaaaaaaaaaaaaaaaaagaaag

SEQ ID NO: 58234 - DNA, 1960 bp, Homo Sapiens
aattttgtcagagccattctagccttctgagccataaacaggagttctgcattagaaacttgaaggccactacctgttctgttgaagctgatattagaacaagtggtctttattccaacacctgttcgtctctcaattctaagagccatgcacctgctaggattattgaagaagttggaaatgcagaaaaatatacagtgaaatatttaaataattaggaagattataaaccaaagttaagtgcttctatttaattttttaaatgtacacatgcctatctatccatatgtagctatatattttaatactttgaatcaaattcttagtcttattttacttaaattatacatgcacattttgcagttattaaaattacttaaatatacttttaattattataccgtatatactcttatttatgtaaatatttttactttttttttttttttttatggagacaagttttactatgttgcccaggctggcctcaaactcctgggctccaatgatcctcccacctcagcctcctgagtagctgggactacaggaatacacaaccatgcccagcttaattaatactttaaatgtttaacgtatataatttgatgataaaaaatacagacttagagtctacgaacatgtaacattattatagacctagtaggagttcctgtttgctatgctacattactttttgtaagatatgtaaaggcatataaatatattttacaaatggtagggccaaaactagggtgaggtaagcaaggtgtctcaggcacaaaatttcaggaggtcctcactctccattgcaaatgctgaccctgaccttccatgaacctgagagtgaatgtttcataaaaatttgcaccaggtgccttgtttgcctcaccctagtcctgaccctgacaaatgataatcctaagtttttgagtatcctaaaaatatactgtttaagatgtgttattatagtcaatatattctgttcctaaaatctaagcactaaattaacagtttgaaggcattctttgtaaataattatttcgcatttgaaaataatttaggatatttaaattatttttaagataatttaaaaattttaagatatttctgtgtatcttattttaacctgtaggggtagaacagtttcttctacattttggcactgattctaccaagtgtgttcttaattttaggtccttctgcttgcaccctcaatactgtaaccattagacaaatgtcttaggtagaatgatcaacactcattacctttacttcttaatctgccgctaatttctaaatgtgagtaatatccagttctcaaaaccaacataaaatgtgctgtcttgtccttacctttcctctctgcaacactgggctgtttgatggtacctcttgcaatcccattcttcttgcctggcttctttctctaaggcagttccatcaagactgtctttgtatcgcgaagcccacatcctcttagttttttgtttgcttgtttgctttcctattttgtttattttgtgttcatttcttttgcttttcttgtagcagcaatagacatagagtgatatttgaaattgtgaagtggtatattgaaaggtttttttgtgtgtgtgtgggagaaatacttggtagtgaaaagtggaaaaagtaaagaaaaactagatgaactaagattacagaaaaatctttgggaggccgaggtgggcggattatgaggtcaggagatcaagaccatcctggctaacacggtgaatccccatctctactaaaaataaaaataaaaataaaaataaattagccaggtgtggtggcattcgcctgtagtcccagcaggagaatggtgtgaaccagggaggcggagtttgcagtgagccaagatcacaccactgcactccagcctgggcgacagagcgagactccatctcagaaagaaaaaaagaaaaaaaaaaaaaaaaaa

SEQ ID NO: 58235 - DNA, 1912 bp, Homo Sapiens
cataaatcataaaattgtaggactagaaagacacttggaaatcatcctgtccagtctgccatgaaaatatgcattccttgggaggtgctttctctcacagcacattcattgtgcagatgtgtggtccaaggtcacagaactggtagcagatctgggatcagaacccagcactccagctcttacccagcatccactcagcagcccacactgagctgatatggcaaagaatgaatgggttactgtctccaggctatgccagggactgcaacaggtgctgtaattacttgtctttagagtaataagcctctgtaataagtatgtaatgtggaagctttattcagcccatcaaccctcaataaccattgttgcctagctgtactctcccaggcccggcccctgctgcattgcccatcacttgggatcttaagtaacagcacttcttgtagaagaacaaggccctgccagatgtgactagatcacaagaattagcattgaacactggttaaaaataaaagtagttttttcatgacattcctatctgccgtgtgtgtatgtgcatgggtgtgtttgaaatgtgatgaacaacagcaatgatgttatatagatattcatatgacaaatgtgtgctggacatctactaacagaaaggccttgtgctaggaattttgttccaaaaacaaggaagcataaatgctgtaagcatggtgtgaacacaatggtctgaggctgccagggagagagcacaatgggttttcaaaggggataagaagggggcagaagaggaatcaaataaggcttcaaggaagtgatgacacttgagtgattttaaattcccagacacctgagaatttgtaaaatcagaaatggagagaatattccaagtagaaaagatagcttgaacccagaagatgttaaggttgactttcagcaaagcttgaaaaatagcatataataactgttcttatatatataatgtagaagaagcacaaaagagagaagacgactagttttaggaaactgctgatataaggattatatcattccaggtcaatctcgtatgttgaacacagagggaaaaattctaaataagagcaaacgaatccagcaggatattaaaataactacattgtcactaatgagccttacctaaggaatgcaaggatagtatgaagttttagaatctatcagtataggtctggcacagtggcccatgcctgtaatctcagcactttgggaagccaagacgggtggatcgcttgagcccaggagttcgagaccagcctggggaatgtggtgaaaccccgtctctacaaaaaatacaaaaattagccagtctcacaatgtggtctcaaaataaataagtaaaaatgtaaaaataaatctatcaatataattcatttattataggaaaaataatatcattagttcagtaggtacagaatcaatcattagtaagctcccacacttatttataatttaaaaaataaaaccaaacacctcttatcaaactagaaatgggaaaaaaaattgctgctggaacctaaaagcaaacgtcatattaagagtgaaataggcaagtctttccagtaaagttcaaaagaggtaagaatgcctgctatcacatctattatccaacattatatttcaatttttttgttaatataatacaagtaaaagaaatagataggcataaggatcaaaaaggcaaacaacaattttagtattttcaaaagttatgagtctatgtaaaaaaaaaagagaacatatatattttcagaactaaaaaaagcactcaaaaagtccaatgacttttagttctaaaaattttaaacacaaaatttacattttaaatacaaaacccacattttaaaaaaatttgtaagtttctataggccaaaaaaaaaaaaaaaaa

SEQ ID NO: 58236 - DNA, 1878 bp, Homo Sapiens
aaaacgtacttagggccattaggatcacatcaaaatatagtgcatggtaattatgcatgaaatagaaggttacctgctgtttaagtagctagtttcttgataatgttgcaataaaatattgagagaaaattggtttctcaatagcagtggaacaccttgtttaagggacaaagtgaactgcattaggctgaaaaacgaaaagggggaaaataaaaatagattttatcatcaaagttgtcagtggatattgttctcagtcttaaagaattatttttagtctttcccttcatcaaaatggagaattatttgtttgcatgtagattgtggtagagttggtatgtttcagatttaatgaaatgcagaacagaataaatccctcgggaaagaaaggaaagaggggatacgccagacttagtatatgagagtagtcaaaagcctggctttaaaagtcaaagaaaccccaaagttgacacctggtccctatgctaactagctgtgtgacctcctccatgttacttaacctttccgacctcccagtttctttagtagcaaaatggagatgttattattaatataacagaccttgttgaaaagatgaaatgagacattgtatgtaaagcactttaggaggacatgtctgtcacatggctgtgctaaattagatgttattatcctgtcaacaggctgaatagcaagggggaaaagttctaaactttgggatcctgtcgtaatacacacagagatctcattccttgtgaaagaatcctcgttttggaatgggatgctgccttggggaactgccatgacaaggatatgaagttacaactgtgatggtggtcctttgaagaatatgtggagacttttctctatattggattattatatttttacttttgggaaataattacactttgaatcgtttcatgattatttggctaacaaaacaggtgatttctgtgagtatatatatgtatatgtgcgtgtgtatatatgtgtgtgtgtgtgtgtgtatatgcatgtatgtgtttatttatttattttaccatggacatgcccttgatgaaaaagaaatactttgcttggttattcctccaagtggaaatttggacattaccctttgttcatggtggggaagatttttagttattccacatatcagaattatctacgtgaatagttagcacataattaggattaaaaagtaactagttgcagaaaactcattattttttctaattctaagaaagtagcttcattttgggtattagagaaaagctcaagagattcactgattaatatgtattgagcctgttacatagctgacaatgtgctagtgttttcacagtttctatctaacttacaaaataactgaaagaggaagaaaaatattctattccatatgtattagaaaactatcctttaagttctaaagttggcttatgatctcctgaattgcacaatatttatctgcaaaccttgaaactatttaatcagagacttctgaccccaaaatgccaacattactcttggtggtctttcaaggtaattcccccttgtttttagtgtatccattgaaacactaaatggaaatatttagtgccctgatgctaagggaatattccaactagcggcactgattccactccaggttattaattaaacagtagcaatcagcccatctgatctttaatattctattgctgctgactgatgcccagacatcagacattttgtaatctaatacaaaattgctctgtgcttaggactaaagaaaaacaacacataatttatactatgttttatctttattttcaagttccagaggatacgctggttgtgtctttcaatgattaacttaaaaaaaaaaaaaaaaaaaaa

SEQ ID NO: 58237 - DNA, 1807 bp, Homo Sapiens
ttagtaggacagccttagggagagattgtggggaaaacaccattgatgcggggctttgtacatttccaccacgctgcttactcttttttgccccctggtggaattctgctgcctctgcatcgtcctagctgggccacttggcttgattttcttattcttaaagtggcagtaggaactagacttcatagggttcctgtgaagattaagaggatgtgtgtgaatgggctttgtagagccagaaaacataggcatttgtgttgtggagaaaagcagtggggagactggaggcctcacttggctgtgattctgtcgaatcaggctggggacccagagctgtatcagcgtgcgattgttgccattggggacaccctggctgggaaggggcttgtggaggcagctcacttctgctatctcatggctcacgtgccctttggccactacaccgtgaagacagaccatctggtcttgctgggcagcagccacagtcaagagtttttgaaatttgcaacaactgaggcaatccagaggacggaaatcttcgagtactgtcagatgctgggccgccccaaatccttcatcccttctttccaggtgtataagctcctttatgcttcccgtctggcagattatggcctcgtgtcccaggctttgcattactgcgaagccattggtgcagctgtcttgagccagggagagagcagtcaccctgtgctattagtggaactcatcaagctagcagagaaactgaagctgtcagatcctctggttttagaaagacgcagtggagacagggacctggagccagattggctagcgcaacttcggaggcagctggagcaaaaggtagcaggagacattggggatcctcatcctactcgctcagatatttcgggagccggaggaacaacaacagaaaacactttctaccaggacttttctggatgtcaaggctactctgaagcccctgggtaccgctcagctctgtggctgacacctgagcagacctgcctgctccagcccagcccacagcagccctttcccctccagccgggctcctacccagcaggagggggtgcagggcagacagggacaccgaggcctttttactcagttcctgagacccatctaccagggactggcagcagcgtggcagtgacagaggccactggaggaacagtctgggaggaaatgctgcagacacacctgggccctggagagaacacagtgtctcaagaaacttcccagcctcctgatggccaagaggtcatttccaaaccacagacaccattggctgctagaccacgaagtatttctgagagttccgccagttcagccaaggaggatgagaaggagtcctctgatgaggctgataaaaactctccccgaaatactgcccagagaggcaagctcggagatgggaaggagcatacaaagagctcagggtttggctggttcagctggtttcgatcgaagcccaccaagaacgcatcccccgctggagacgaggactcctcagacagccctgactctgaggtgggggtgaaggccgaggatccgcatccagcgggggggcagctgcgggcgctggggttggaggcttgtctggaccagagagtgtttcctttgagctctgctccaaccctggtgttcttcttcctccacctgccttaaaaggggctgttcctctttacaacccatctcaggtgcctcagctgcccacggccactagcctgaatcggccaaatcgcctagctcagcgtcgctatcccacccagccatgctgagaataaacacacgtcccaggctc

SEQ ID NO: 58238 - DNA, 1807 bp, Homo Sapiens
tcgtttttacatagcacctttatacacgatataaaaaagtaggttttttgcatcaactgcaaacatgttttgtactctgtggatcggaatcttggtgaggaagagcattgcatcccgcaaaaggctgatgagtcagttagctggagagacagtgccatcattctgggttgcagttctggtgaagtaagtaggatgttaacactgcagatggaaatggttttcagattgccacatggaataatagtatggaacgtgaaatttcaggaataggaggagattcttttattattttcctccttccactttgtacatttttttaatagcctgcaactagttacatttatctttttttttttttttacatttttatccataatacaagtaacttgactaaagccagtgtctgtttcatgtaaatatattaacaggtccaaaatcaccaactaaaattagctttatactgactttttctaaagtcagtccttgtctcacccaaatattttaacaagtccaaaaatagcacatagctacttggaaccatattaaaatctcattataacatgaatttcaggtattccatgttgtagacttctccttgaaagataatgacattgaaaaatgctcttaagagagttgttaattctgtttcccaaaacttcctggataaaacaattctaccttaatgctattaagactatggtaggtggtttttttcttaaagtaacaagactgacgtataaaatatgaatgcgacatttaagatgaaagtgttcataggcacacctcgctttattgtgctttgctttattgcgcttcgtagatactgtgtttttactagttgaaagtttatggcagccctgtgaaaaataagcctgtccgtgctgtgaagcgaacagcatgtgctcacttcatggctctgtgtcatgtttcggcaattctcacagaatttcacactttttcattattatctgtgactgtgatctgtggtcagtgatctttgttgtttctaatgtaatcattttggggcattacaaaccatgcctgtgtaagatggcggattagtacattctcacaccgctataaagattctacctgagactgggcattttatgaagaaaggggggttataaagatactacctgagactgggcattttataaagaaaggagggttaattgactcaaggttctgcatgtctggggaggcctcaggaaacttacagtcatggcagaagatgaaggggaagtgaggcacatcttacatgatggcaggagagagagtgtccaggagaaacagccacttttagaactatcagaactcatgagaactccctcactatcatgagaatagtgtgggagaaactgtgcccacgccaatcacctcctaccaggtccctccctcaacacatggagattacagttcgacatgagatttgggtagggacacagagccaaaccatatcaaatggccaggttaattggtaaatgtcgtatcttctgactgctccactgactgactgttctcctatgtctccctctcctggatctccctattccctgagacacaacaatattgaaattttaggcgaattcacaaccctgcagtggcctttatgtatttaagtgaaagacagagttgcacgcctctcactttcagtcagaagctaggtggctcacgcctgtaatcccagcactttcagaggccaagtggggcggatcacttgaggtcaggagttcaagaccagcgtggtcaacatagtgaaaacacctctctactttaaaaaaaaaaaaaaaaaaaaaaaaaaaaa

SEQ ID NO: 58239 - DNA, 1790 bp, Homo Sapiens
aaaatgacttccctgggaaccagaacatccaggttggcctcaaacttgctgccaaacaggaattgtggcaagccggagaggattctgatgcttggaagtgggcgaatgttttgattttcaagcaaagaaaaagctagcttcctagaattacaggccagtgaacttgtcatcattcccagagagtgctgaaaagaattaattaaatgatttttcagctgttaaaaagggatcctctgccccagcagaactggcagagatccctaataacagttcctgccaaaaaaaaatgattgcagctttgaaaaagagggttacttcaatgatgaatgagaaagcgttgtagatgctgtctcaggattttggtaaggtatttgagaaaggcactacatttctttgtgaaaaggcaggagaaacagggcttggatggcagtgcagtcccacaggctcatacccaccatgctactcaaactaccgattaatggacctatgtctacctggggtggagggctgcaagggtggacctcagaccccaatctcataatgaggtagtgagtgaggcaagacacccccttacctggccatggcttaagagttgtagagcagagatcagaagccacagccttggtcagagggagggaaacaagcccagctggatgaaaaaaaaggagcatggagacaaaatggggggtggggagcaagggacactgaggacagctgagaaccaggggctgcaggtctgccctggggaggcaggcaggtgggtttcaaaggcggggcaccatcgcttgtggaggtttgtcattctcagtgcactcttgagattgtcacagatccatttaaaagggctgaaaggagacagagatttgtaacctcagacctgccctcctcaactgatttattaccagtgtgaatgaggacgtggatataagacatgttcattaagcctgcaggtgatgtgaaggtggaagagagaactaaaacgttggatgacttcggtacctaggtccaaaaaactcagttgttctgagtgtgtgataaaatgctatttagtcgtgacccgtgaggaggaggtagaggctggagagtcagtacagattaacgtggctacaaaagcgtaaggaagacttaggcctctgtagcagaagaatatagttcaagctgagatgggtaacaagccttaccttaacaatatttctctgtcccccacaagtcagaccacatctgaaattttaaaatgagctccagtttccatcactgaagggcaaatcttgagtgtatccattggagaatgccgtagatactttgagatttcattcatatatatatatggattaatatgctcaccctggagagcatttgagggattttaaggccactggcttgaaataagcgacgtgcacctgagggattggatgtatctttggtaacaccatagggcgtaggtttgagcttcttagcctttggcgctgtctgaaaagaaaatggaggccttgggccgggtttggtggctcattcctgtaattccaacactttgggaggctgaggcaggtggatcacttgaggtcacgagaccagcctggccaacgtggtgaaaccccgtctctactaaaaatacaaaaattagccgggtgtggtggctcatgcctgtagtcccagctactcaggaggctgaggcaggagaatcgcttgaacctgggaggcggggattgcagtgggctgagatagcaccactgcattccagcctgggcaacagagtgagactccgactcaaaaaaaaaaaaaaaaaaaaa

SEQ ID NO: 58240 - DNA, 1781 bp, Homo Sapiens
aaaacatgaccaggataggcatgccctcagggcagaagaaattatattctgcatgccaaagtcaaatataaatggcgtggtatatttccattttttgtgttacccagaccactgcttccttgtattttcttaaattatatagaatcattttgcacctatttcgttgttctttagtttttaaattcaccactgtgaagctgcagtatcagtttagaagagattagtataacagtctctttatatctctagaggtagcacatagtgacgcggcagtagctgctctttcctgcctgaatcatattgctgtccacctgcacactaggccctgtctttgaaagttgtctggtgtaatgaccagtaggaagtgataaaatgtaagtgacccatcagggaattataaggatgttctgggaaggtaatgatccttcatcaaaggtgtgtccagcctcttgacaagcagtagctatccagcatccccatgccagacactcccttccagaatagctgtaactgccaggtgaacagtcttggtgacttcgtccatgatgcacagagttttagagaaagtaagcccaaggctggcagatccccagtccaggttagaatcgactttataattttagaaagtcttaggttttaaaacttgatgtctgttaagaattcatttagatattacatatattgctgttgtccaactgtgtcaatgtggccaaaggccctacagcactacagcacagaaagatatctgttcataaagaaaaattgccactgctgtgattctatattaatcagacagcaataagcatgtttgttgtttaagaagatccctaccgttttttcaaagctggcctcacaaaccagagtcaaagtcataaacctggccacatgcagtggcttacgcctgtgatcccagcactttgggaggccaaggcaggaggatggcttgagcccagaagtttgagatcagcctgggcaacatagtgagacctcatctctatttaaaaatgaataaataaataaacataaacctttcagcactcaagagtagtgaggcaaaatcaagtagggaagctacaaatttgtacccaggtaaatagattaaaaaaaaaattttattttgcaatgccacctcattcttctccaaaatcaacattaagcacaaaacaaaagtttaatacacacctctaataatatacaaaatgatttgatagtaccagcacacatttagggagttatatgtgatgactcgatgaaaaatttattcccttggtacacaatttgggttgtctgcaaaataagaactgacgatatctatagcacaaaaataatattttgagtgttcactgtctgccaagcacttaacatatttaagcctcctttcatccctatgaccacattgtaaagcagggaagtaatgctatgtctactttggagataaggaaaatgaaattcccagaagcaatgtgcccaaggagaggaagaggcaggaagagctcggtgagcatgatcatggctcaggttctccatccacatgcctaagacaggggtgagtgtgaagatgggaactgactcagaattaactgtgtgatcatgggcaagttgccaagttaaccctcatatctaaattcaggtatccttgaacaaacatagacagatactgatgatccgccatgtttactataaccataaactctttgtgaattaaaaatggcctctcaacctggaaaaaatgtaaaataatattgagaatggaatccactaaacaaaaaaaaaaaaaaaaa

SEQ ID NO: 58241 - DNA, 1697 bp, Homo Sapiens
tcattcaagggctgggaacggtggctcacacctgtagtcccagcactttgggaggcagaggcgggtggatcacgaggtcaggagttcgagaccagcctggctaatatggtggagactgtctctactaaaaatacaaaaaactggcacgcacctgtggtcccggctgcttgggaggctgaggcaggagaatcgcttgaaccctggaggtggaggttgcagtgggccgggatcgcgtcactgcactccagcctgggtgacagagcgagactccgtctaaaaaaaaaaaaaaaaaaaaggaaaggtcatttcccaatccaaaaaagtaggaagtatgtaccctttttgaaggggatctgctcctccacacctgtgggtatttctcgtcaggtgggacaagagactgagaaaagaaataagacacagagacaaagtatagagaaggaaaggggggcccaggggaccggcgcactcagcctgagaggacctgcaggggcgctggtctctgagttccctcagtatttattgatcattatttttactatcttagcgaggggagtgtagcaggccaacagatggagagaaggtcagcagggaaacgtgagcaaaggaatctgtatcatgagtgagttctaggaaaggtactgtgccgggatgtgcacataggccagatttatgtttcactttacataaacatttcagtgtagcgaagagtaacagagcagtattgctgccagcatatctcgccaccagccacagggcggttttctcctatctcagaatagaacgaatggtcggctttacaccgagacattccattcccagggacaagcaggagacagaagccttcctcttatctcagctgcaaagagtcctctctccttcactgctcctccttagcacagacctttttacgggtgtggagctgggggatggtaaggtctttccctccccacgaggccatatctcaggctgtctcagtgcggggaaaccttggacaactcccaggctttcttgggcagaggtccctgcggctttccgcagtgcactgtgtccctgattaatcgagaacggagaatggcgatgacttttaccaagcacactgcctgcaaacaaattgttcacaaggcacatcctgcacagccctgaacctattaaaccttgattcaacacagcacatgtttctgtgagcacaggtttctgttaaaattacaggttgacagcatctcaaagcagaaacagtgtttcttagtacagatcaaaatggagttttctacatagacacagtaacaatctcatctctgacccctctctctctgtggacactctcccaggctctgcaggttgaaaggagtttccctctgtctgttcatggccacctggtagacatgggagaccctgtcttcccactccgccccgagtttcctgagggcaggagatgggtctctctcactctgtggtcaggcaggaggagtgcagaccgtaaccctgtctttctgacccagtgccctaacctgtcagcatgaaccacaccacaggtgcccagacatcagagtttcacagacagaaatagtttccccagagttttggggcttttttaggctcaactatcatgcattattattctttcataaaaaaagggtcattttcccagcctgggcaacatggtgaaacccagtctctacaaaaaaaaaaaaacc

SEQ ID NO: 58242 - DNA, 1651 bp, Homo Sapiens
gatctttgctctaagaaaacctgatattggctggcacagtggctcatgcctgtaattccagcactttgggaggccaaggcgggaggatcacatgaggccaggagttcgagaccagcctggccaacatggtgaaacttcatctctacaaaaaatacaaaaattagctgggcatggtggtgcacatctgtaatcacagctacttgggaggctaaagcacaagaatcgctggaacccaggaggtggaggctgcagtgaattgagattacaccactgcactccagcctgggcaacagagcgagaaaacctgatattgagagaagaatgtggatcttacagattcagacatgcctgggtttgaattctagctccaccaccttgggcaagtcccgtcacctgtgggccccattttgcacatcagtgcgatgcagcaatgacacctcccttgcaggcgatgcgtgaagaatgcccggcacagtgggcatcatcatttcacaaacacgtatactgctgacacaggaagacagagcaggagcccaatatacacggactccgtttgtcccttgccctcctcgagtctgtgcggctagaattagacttagcacagtgggctgaggggccctggatggggtggctgcattgctggcctgagtggaagccctctgcttccacccccatgtgtctccggagcagggagatgagcacccgattgggaggaggaaacaaggtttccagccttggcttggccacgcacttgctgagtgcccttgagtaagtcacttcacttctctgggcttcagtttaccgtgggtaaagtggggtgaagtagaaggacctttccaactctgatttgacaactctggggcatggagctggggactgctcacaggaaagcccagctgactttccttggcttgcttctgagtgagggcagttgtgactgcagcagggaagctctcctgaacgccttgctctgggatgcagtaatgattacagagggctggggagcaggagcttgtgtctccacttcagaaaggagaggcctgaggctcggaaagggcaagtgacttacccaaagccatccagcattgttgtggcggggcacctgtcccttacccatagctgctctgaagggactgctgggtgggagttgctgcggtaccgtaggggaaagcagaagggtggcatgggctggaacaatccagaaagacttcccagagagccttgaaggatgagaaagatttggattagtacctctcaaagtggcttttgcaaaatactcaagctggaggcaggatatggtgaagaaaagtggttcttgggctgggttcagtgactcactcctgtaatcccagcacccaaggatctcttgaggccaggagttcaagaccagcttaaacagcatagtgagaccccatgtctacaataaaataaaataaaataagtaagctgggcactgtggctcataactgtagtcttagccactcgagaggctgagatgggaggatcattcaagtccaggagtttgaggttacagtgagctgtgattgtaccaatgcactgcagcctgggacagagtgaaaccctgttgaaaggaaggaagagagagagagagcggaaggaaggagagagagagaaaaaaaaaaaaaaaaaa

SEQ ID NO: 58243 - DNA, 1569 bp, Homo Sapiens
gcttaatcagcagggaaacccaaacatgaacctccacgagctgtcactgcaccacacacctaccagaatggctgacattttaaataagctgacagcactaaatgttgacgtggatggggagcaacaggaactctcattcgctgccggcggcagtacaaaatggtacagcaactttgggagccagcctggcagtttcatattaaattaaatgtacacctactctgtaacccagcagtcgggctcctgggtgttcaccaagtgaaatgaaaacacgtccacagaaaaacctgtccatgagtatttatagctgcttgattcattaattctccagactggaaacaacctgtgtccttcatccagcaaatggatgcacgggaaggtggcgtatttatactgcggggcaacacacaggatggatctcaaaggcgtcatgctgagtaggtggttggctgaatcatggccacagcagattccaggaacctgtgagtgtaaccttctgtggaaaaagggactttgcagatgagattaggttaaggatcttgagatggggaggttaccctgcattatctgggtggtccctgtttgtcatcacaagtgtcctcgtaagagagggacagatttaatgtagacagaagaggacttgaaggctgcatgaccccagtgggcagagattagggtgatgcagccacaagccagggagtgcctgagcctgcagcaggtgaagaggccaggaaaggtcctcccctagagcccccaaaaggagggagcctgctaacacttggatttcagacttctggcccccagtccgtgagagaaccagtttccattgttttaagccacaagtttatgctcagttgttgcaaggaccacgggaaactcatcttatgtgattccattgataagactttctggaaaggcaaaaccatagggacaaaaaaacagatccaggattgctgagggtgcggggagggtcagtctccaagtggggatgcaggaaattgggcagaaaggaaggtggcctgctcagcgtgctgtcctgggaaaagcaagcaaggtgcgtggagcgtgtagaggccacagttttgggcaatctgcatatttttgtctacaagatttctgaaaaacccttttccataagctttctatgcaccttcgtgaatgcagatagaaatatctgctgtgggctgggtgcggtggctcacacctgtaatcctggcactttgggaggctgagtctgtcgagttgcttgaacctaggagttcaagtccagcctgggcaacatggcaaaaccctatctctacagaaaatagaaaaattagccaggtgtgttggtgtgtgcctgtggtcccagctactcgggagctgaggcaggaggatcacctgagcctagaaggtcgaagctgcagtgagctgagatcacaccactgcacttcagcctaggtgacagggcgagaccctgtttaaaaaaaaaaaaaaaaaaaaaaggaatgaaaagacaagccatggactaggagtaaaatgtaaaatttatcgtgataaagctcttgtatataaaaaaaaaaaaaaaaa

SEQ ID NO: 58244 - DNA, 1425 bp, Homo Sapiens
ccacgcgtccgctcatgggaaaaaaatgtctctcgggctgtgagcagtgaattggcttgtgcccaagtaatgtcctcaaggtgtgccatgagagatgaagtcacttggctcattttaccagcttcaggatggcattaagacctgacaaagccaggcaacacgtacaaggaaactaacctgaggcaggaccgtggcactgaaggagtctccctggatgcagcaaaggtggagaccttgtccaagaaaaatgctggacgggcctttaccccaaagaggaaagctgggtcatggaacaaggaaatgaattacatcaagtgaaaatgcacatctgatgcccagtccagaccaagcacgtctgttcctgctgacttcgaatgattgtcaagtggctggactcagatgttagccgtctgtcattgctgctaataacatattcatgtacaaaaacaacagaggggtatctaggcagctggagccctctgtgttccggactacagattcggggacccaaagaaaatctttgtgtggactttggagtttctccctgaaatgtgccaggcgcctgagtcagacacaaacactcccttaggaccttcgtcagaaactccacccctgtgtggaatctccttcctctctctctctccggaggatgccacccgaattcgaatgtgactgtgtgtttctgctgagaggtccattgtcatccccagatgaaagaagagaccaaagcagttaccactgatggaagccagtgaagatggttgggggaactccttaacctttcttggaatgttttgaacgaggacgctggtcctttgccagtcaggaaccagcagaggatgctcctgctctgatcccagccagggtggagagtgcagagtcggccacagggctctccgtggaggctatggcttcagacaggccccgaaggtctgtcaccaatgtgctcggttgtgggtcacataacgctctctggagggcttgcctttcagcttgggatcatgaaaagatgatttgacgctgtttctcatggtctccgacctaataaagcaagataagagaaaacaaatgttattttaaaaaaatcaccctttggcaaaagaaacatgtaaaattagaatctggcacaaacaaaacctgaatctgggttgtgaactttcaccacccgccgcaactctttgataaaacctcaagtgatatctattaccattgtaaaaataaagcctgcccctatgcttagaatgggagcgaggggtcatatggtcaagtctaaggggaagtgggcagtaaatacaggttttaaataaactaaaaaaaaaaaaaaaaaaaaaaaaaaaaaaaaaaaaaaaaaaaaaaaaaaaaaaaaaaaaaaaaaaaaaaaaaaaaaaaaaaaaaaaaaaaaaaaaaaaaaaaaaaaaaaaaaaa

SEQ ID NO: 58245 - DNA, 1413 bp, Homo Sapiens
ggggatgcaaacggccacacagtcatggattcacaatgatctgggtctccatcatcctgcaatccaacaccttgcacagccttcaaacaccagctgggaattcaaaagtggcatgtgcggtagcaggagatctgttcaccctcttatttcctctcatccccatgtagcaatctggtgcaatcacagctcacagcaacctcaaactcctggactcaagtgatcctacctcctcagcctccctagtagctgggactacaggtgtgtgccaccctgccaggctgatttttgtagaaacagagtcccactaggttgcccaggctagtctcgaacttctgggctcaagcaatcctcccgccttgcaaatacagagtttgataaaagacctcctgaggtcctacagagagaagtctttaagctccagggcagagacaatttgcatttttctcaccacccagggaatgctaactgggcagcccagggtacccgggagctcaggccatccagtgtcctttgagatgttaggaggaagcagaacagccagctgccaaatgaaacacggcaaaatgctcacccttcaagggtctgcttttgttttgtttttgttttttggggcagtctcgctctgtcgcccaggctggagtgcgctggtacaattttggctcactgcagccaccacctattggattcaagcaattctcctacctcagccttccaagtagctgggactgcgggcacgcaccaccacggtcggttaatttttgtttttcgtttttttggtggagacggggtttcgccatgttggccaggctggtctcgaactcctgacctcaagtgatctgcctgcctcagcctcctaaggtgctgggattgcaggcatgagccaccgcgcccggcctccctcaagggtctgaatccagccagtgtcctacgtcatacctgcttcagcctatgcaatggagagagcctgagattttatttcaataagaaaatctactgagttgcattacatcaaactaaaagggagaaacacaaatataaaaaataaaaatccagaaattccaacactaggcaaccctccaaaatgtggcaaagctctgtgtatattaaaaatgtattgagtccgggcacggtggctcacgcctgtagtctctgcactttgggaggttgaggcaggtgatcacttggggttaggagttcggggccagcctggacaacatggtgaaaccccatctctattaagaagaagaaaaaaattagccgggcatggcggcaggagactgtagtcccagctatttgggagattgaacccggaaagcggaggttgcagtgagccaagatcacttcactgcactccagcctgggcgacagagtgagactctgtcgcaaaaaaaaaaaaaaaaaaaaaaaaaaaaa

SEQ ID NO: 58246 - DNA, 1172 bp, Homo Sapiens
gggggctgggggcataaggatgtcttttggagtcagattcactggaatattttttgccactggcctgtacttcccttgtcctgttaataagcttaattttattggtacttcattttccattttcatttcaaaatgttctcatgagtttaaaaatcaattttaccataatgtaaatacagacctttggataggcaccaatctctaagagtagaatactgagaggcttgtctattttttttaaggaatagctttttctaaacacatagtcaagataccaatctgaagtctttcattagctttgaaaaaattataagcagtataatgtacatggtctctgtccattttgactaatttaccacaaaaagcaaattgagaggcttgaacctcaaatctgtagtaactagaaatgcacgatgtgatgactcctacgatattaacataccttatatgttacagctggcagatttgccagccaaaaattcattcccagcgataaactgagtaactagccacccaaatctctacattttgagcttttcttcacagaaacttaaaatcatcttggttaaagtgaaaatgtaaaatgagatcttggtagaatttaaaaagacaaaatggctttattaaagaccacaattgtgtcctcacttggaattattttttcttcctgcttaatctcatgacataaacacaagagcagggagagtctcaattaaaagcaagaatcctggaattcatcctaggtccaaatccctgctttgccacttaataatggtgactagacaagtcactaaacctctccgagtctgtatcttttcctacataacataaaagcagcagtgatcacatggcattgttgcaaagattaaattaaaaaattcctgttttactctttcattaggcatgtggaaagttttcaataaatattagttattgtaacttctaatctagttccccttgtttactagtgaagaaaaggagatcccaaagagttgagacacatgtgcccacatttatccaactggttgatagttctggaactagaagctgctgcccctgatgcctagaacagagctctcattaagctgcagggcagctagggagcttttggtatctgtgttccagacatttccctactcaccaaaaaaaaaaaaaaaaaaaaaaaaaaaaaa

SEQ ID NO: 58247 - DNA, 1087 bp, Homo Sapiens
caccactgcactccagtctgggtgacagagtgagatcccatttaaacaaaaaaaaaaaggaaatcatcaatgcattgtaacagggtagagttgtgggggaagatcatgccccttaaatcagcttgtaaaatgtgagaaaaacaagtgaggcaatctgtatccctggagaaggactgtgcaggtgaactgtttgcctttccacgtgaaggcaaagagaaactgacttcctgggttgacagggatgctgaaagaggtgccactgagatcaatagctgaggaacatcaagtgtcaacaggtgtgttaggattgtatgtgggtctggcgtagtggggtgctgaggtataacaatattgttaatggctcttaggtcttgagacctccatccctttccatttggtttctggacaggcagtatgggcatgctgcaggggctagtgcaagggactatgaatcccttggagaggaaatcattaataatgggctgtctaccagccaaagcttcaggattgaggagaccctgccttacattaggtagaggtttgttggggtctaaatgtatggtaataggtggtgctgagtgaattagacctacatcagtgttagatttagccaagtgtatcaggcggttctcttaaagccaggtgctgagtggcaactgagtaattagtgacagacaagggaaagacatgtaaggtcaattgatacggtttctgaaggagagacctgcagaatggtatctccctaatgagaaaaagaaatatgagcctggtcagatgtggtggctcacgcctgtaataccagcactttgggaggccaagcgggctattcccttgagcccaggatttagagagagaagcctgggcaacatggcaaaactctgtctctataaaaaaatgcaaaaaaaaattagctgggcatagtggcatgcatctgtagtcccagttatttgggaggctgaggtgggaggattgattgagcctgggatttcaaggctgcagtgagctgtgattgtgtcactgcactgcagcttgggcaacagagtgagaccctgtttctaaaaaaaaaaaaaaaaaaaaaaaaaaaaaa

SEQ ID NO: 58248 - DNA, 998 bp, Homo Sapiens
gggatgctcttaaccttgtaaatctgatcaagcttcagatgccttctaacttagtttatcagtaaaatgttagaacttaacaaacatttccgaagacagtgttaaatgaggtacagatataacaggaaagtttattatgtgaaaatttagtcctttagaaatacgttttagggctgggcccagtggatcatgcctgtaatcccagcacttggggatgctgaggtggacagatcaattgaggccaggagttcgagaccaagcctgggcaacatgccaaaaacccatctctaccaaaaatacaaaaattggccaggtgtagtggcatgcgcctataatcccagctactagggaggcagaggttacagtgaagattgcgccactgcacttcagcctgggcaataaagtgcgactcaaaaaaaggtttagtccagatgcagtggctcacacctataatcccaacactttgggaggctgaggcaggaggatcttttgagcccaggagtttgagaccaccctggacaacatagcaggaccctgtctatgcaaaaaaattagctgggtatagtggcaggcatctgtagtcctagctactcagtaggctaaggtgggaggactgcttgagccagggagatcgagattgcagtgagtcatgatctcgccactgcactccagcctgggcaacagagcaagaccctgtctcaaaaaaaaaaaaaaaaaaaagtgaagtggcatgatctcgactcactgcaacctccacctcccaggttcaagtgattctcctgcctcggcctcccaagtagctgggactacgggtgcctgccaccatgcccggctaatttttgtatttttaatagaggtggggtttcaccatgttggccagactggtcttgaactcctgatctgaaatgatccacccactttggcctcccgaagtgctgggattacaggcatgagccactgcctggccgaaaaaaaaaaaaaaaaaaaaaaaaaaaaaa

SEQ ID NO: 58249 - DNA, 984 bp, Homo Sapiens
cccacgcgtccgcccacgcgtccgcaggcactgaagtacttgatactaattggatattatgaccacttttcagcaattgtattactgtaatggtgggatccataaaggaaatggtaaacctgtcttatatgggtagttgtgtgaattgcaaaacttacatcaaataatttttttgcctcgtcttttgaacaagtcatgacatcattctagttcctttttcaacttagtgagatgtctgctctgtgttaatattataatgtgtataatctacaacagaattgtcctccaaattgcaagttttcctttttgaatctaatatatcaggctcatttttagatgacttagatgcataaggattttatcgtagcttgatgttagctctctgtaacctttcaggtatattaatcaaaaaagccaaacttaataaagcatctaatttaaaatggattgatctcaaatattttatagccactatcttttcacaatagtaaaacataaaagagtttaagctatgccaatttagagagtgcttaacaatgtgtaattactttattttcacttaatagatttttacctgtgccttgtttcagatctgaataggtttcctttgacctcaaaatcactaatgcagggaaaattaccatatcatgagagtatttttcctctttcttttttttgcctgatgcttagaataataaatactcccaaggcttaggagtagacatggcctgagagaaagcctattaaatgctattttctaatggttttaaaaaacaacttaaacaaatcatgctactcaaactgattttcttgctaaaacagaactagttttagagtatattttagacatctttttttctcaattactagttaaacttgaagttgggctctatctggatttgctttatagatctgcttcatttcatgccagatttgggcaaaccatgaacaacccccaactccaggaaaaaaaaaaaaaaaaaa

SEQ ID NO: 58250 - DNA, 577 bp, Homo Sapiens
cgcactgagtttccaacctccatttcagcctgtctgtctcagggtgcagccttaatgagaggtgattcctaagctgctgggaacctgaggttgtcaaaggggcggcaggaaatggacagcagtataaaacccagaaacagaacttgaaggttaaaccactagcccatttcacagattttctccaggaaacatgttttacttgtgcacgttcagttttcaaattttcaggtgtgaacgctggtgagagctgcttaaaaacaaagctatgggccgggcgcggtggctcacacctgtaatccccacactttgggaggctgaggcgggcggatcacctgaggtcaggagttcaagaccagcctggccaacgtggtgaaaccccgtctccactaaaaacacaaaaattagccgggcgtgtggtggcgggcccctgtaatcccagcttctcgggaggctgaggcaggagaatcgcttgaacccgggaggcagaggctgcagtgagccgagatcacgccactgcacccttctcactgcactggtgacagagcgagactccgtctcaaaaaaaaaaaaaaaaaaa

SEQ ID NO: 58251 - DNA, 421 bp, Homo Sapiens
gcggccgcgtcgacgtaacggcttaactcttccagtcattcagactcctgacatgcaacgaggtctagattatttcaaaccatggttaagttctgatactaaacagccctttattctggtaggaccagaaggatgtggcaaagggtaagaaaaatattggcaaaggtatatgttgtggatttattcctgccgcccctaattgatttaatggcttttgttatgtttcttttggttaaagtagcatttacattttcatggaagattcattttattttcattacttataaaaataagaactatggggaatagtgtgtccttttctttgccaggttgtgtgatttctactggaaagacagcaatctgagaagatactcttaaaaattatccgtccatataatacagcaaaaaaaaaaaaaaaaaa

SEQ ID NO: 58252 - DNA, 328 bp, Homo Sapiens
gctggtaaatttagagaaggcatcatactgggatcttttttcacatccagcccatgcggactgagcagccaaagcttgacagagtaggttgtgacagttggaagtgtcatgtacaacatgcggcgattaagtctttcacccaccttttcaatgggatttcatctgttagttactgtgagtctcttattttcccatgtggaccatgtaattgctgagacagaaatggaaggagaaggaaatgaaactggtgaatgtactggatcatattactgtaagaaaggggtgattttgcccatttgggaaccccaagacccttcttttggggaca

SEQ ID NO: 58253 - DNA, 577 bp, Homo Sapiens
tttttttttattattgtgtttttttttttttttttcttgaatatttttgacctgcagttggttgaatctggggatatataatctatggatacagagtgctgactacatatccatattttatctagctatcttataaactgaaaagatttccaacttaaaaacatgacactaaaaaaaagctcatattaattgtgatgttttacaaatcacaacatcagtacctcttatatatttcatctcattttaaatatggtctggtcacacttagggtcctttaaaataatgagatattgtataagaatatgcttaagaatagggatctgtatttgactgacaaagggtaattaaaatctatttctatctctatttaccaaataccctatctttaatgcatttttgtaaatctctggaaatcataatatagtcaaagttttaaaaagaagaccttaggctggacatggtggctcatgcctgtaatcacagcactctgggagggtgaggtgggtggactgtctgagcccagaattgaagaccagtgccggcaacatggcaaaacaccatctctacaaaaaaaaaa

SEQ ID NO: 58254 - DNA, 465 bp, Homo Sapiens
tactcacggtatttatttatacatacactttaaaaatcacgtattctaacactttgctgtttccttccaaagttttgaatagaattcagttgctccaagacacacattcatttacatgtgggttttttttctttactaaaatacatttacttttagtattctcaagtgcaaaagagagttgaatcttctattgcatatgaaatggagactagtcttccacaaagagtaaaatgaagttttgtaatggccatcatctgtaattgcttacaatgacagcataaactctaggattttgttttaacttcatggctacatgggtaaagttaggtttgaaaatcatttcaaaaacaaaatttatcaaacaaaaaacctggacaggtttttattttttatttttttgagacggagttttgctctgttgcccaggctggagtgcagtggcgcgatccctcgtgccgaattctt

SEQ ID NO: 58255 - DNA, 863 bp, Homo Sapiens
tagggtggctcactcatgtaatccgcccacctcagcctcccaaaatgctaggattacatgagtgagccaccctacccggcctattttctctttataacagtatattctcatattaatgtgttgtcccaatttttaaaattgtctatttgagtaattatccagaatcatgactgacactaccattttcattaatactttagatcaaagtaattctcacttaattcttatagtaatttcacctgacacttggggactggtaattttagcattggtgtttctaaaaacatactgtgataagctgctccatcaccatgtatttggtttctttgtctataaaactaaagccagagaaatgaggtgcttgacaaagcattgaggtgtcaaggggcacatacagatttcaaattggaatcctggaacaaacatggtaggagaacagaagagggtcccatctgcatattcttactgcttagataaagcagctgtcgacttggctttcctttatcctgactttccagagttgttcaccaaacaggtaacaagattgagctttaagtctttatttcatattgattcttcataaattaaattatcttatgacttatggctccatgttgtaagtaaaaagtcatttgaccaactgtttggaattcttgtcaataacaattattgagcacccatgttagtgaatttctgtgtgtgtgcactgggtggtgagaaaaggttgagagcaaataccttgggtatactttgtaaggaaccatgatcagcttgtcatgcaaacatatgacaactgtgcaaacattttttacaagagacagtcttaacaaaaacaaaaaaaaaaaaaaaaaaaaaaaaaaaaa

SEQ ID NO: 58256 - DNA, 424 bp, Homo Sapiens
tttttttgagacagagtctcactctgtttcccaggctggagtgcagtggcgcgatctcagctcactgcaagctccgcctcctgggttcaagtgattctcctgcctcagcgtcccaagtacctgggattacaggtgtgcgccaccatgcccagctaatttttttatttttagtagagacggggtttcaccatgttggtcaggctggtcttgaactcctgaccttgtgatccgcctgccttggcctcccaaagtgctgggattacaggcgtgagccactgcgctccatcccggcccgacttttggggagtgaagctttgtcctctgcagtcacacaacatgacaacctgggaggaactgcagtttaaatctgattccaaggctttttcccccaacccaggtcaacacactcaaccaggcagggtgg

SEQ ID NO: 58257 - DNA, 653 bp, Homo Sapiens
atcatcatcatcatcatcatcatctacaatgtcatttcccaccgtgcccagctgagatctgatggttttatacatgtttgacagttgctccttcacatgttcccactctctgtgcggccaccatgtaagtcggacctgcccttctgccatgattgtaagtttcctgaaggacttccccctctgccatgattctaagtttcctgaggcctccccagccatgtgaaactgagtcagttaaacctctttcctttaaaaattacccaacctgaggtatttctttatatcagtgtgaaaacagactgctatactttctgataatcatgcttaagcaattggggaattcagactagctgggatcaaactatggccccacccttagcagtcatgtgaccttggggaggttgcttaccttctccgtctcaacaacttctgcaaaatctgtaacatgagattgtttctgagggttaaatgagcatagcacagtggggacactgtcaggcacacactacttgccagatgtcgagtattcatctttattgaaataggactgtggtaagccactttatggctctcgatttcgtatgacgaaaatcatgcttagtgccccttgtttagttaaaaaacacaatacctacactcacaacaaacaacaa

SEQ ID NO: 58258 - DNA, 3991 bp, Homo Sapiens
cttttgtatcaacctaatatattctgccacaaaatggctggtcacaaaaggattataataataatattattattattcctgtgaatggtgtctgcaggtagctatcacttatttgttctgctgatattatccattttttttgaattttgcctattggctggatgaaaattggtgtcaccctcctcatgggtttctcttgcatttccttggttgctagtgaggttgggcaccttttacgatgtttattggctgttcatatttctcctttgctaatcacatggcttttcaattttatacttagctgttttctctttgttctgtctgtaatttaattttgttaatgatgcgaactagagatttaattttatgttttaccaaatgaatagccaacactatgtattgtctgttgtattttccccactggtttatatgatgttgtgtattatctaccaaatttacatgtatgcttccaaagtcttattccatcccattcttttatttttctttcatgattaacaccatatttttgaattgctaaaactttataatataaatataagctttgtatgtctataaataaaatacgttttattaattataattatatgttatataattataatataagcacttgaacatatatacttctataattatatattatataattatatatcatacttctatgatatgttctataattatatattgtatatatcatagttctatgatatgttctataattatatattataaagttacaattaattgtatatttaatttataccatatactgtaataagcaaaatatagaaatatgttttaaatctggtaggtggtatcttgactcattggttttatatgtttttctgattttctttttgttcatttgttcgttttggtttttagttgctgttgtgtttacttcaaattttttcttatctgtcattgctcattgttttttagatgaatttttaattgatttttttccagttccagttgcaatatggattaggacagcattgaatttgtagattattttggatgaaattggcatctttataactttgagtgtttctatccaggaacttagtatgtttctttagtacttcttttatgtacttgaataaaatttgtctaacttgttgatgtatccccaaagaaccagacatttttattaaatgtattttaatatttttttctgtctcattagtctgtgcttttatccatattaagtcaattaatttttggacttatttcattgttttttttctggcttcttgagttgaaagtgtagttcactctttttaaggatttttctagcaaatgcttagaagtgtatacattgtcctctgagaactgctttggttacaacccacaggtgtgccatgtggctctctatataattccttgctgaagaagtttttacttttcatcttgttttttttaatccgaggaattatctggaacactgtttttaaatttccaaatttattttggctagtttgtttttaatgtctaatttctgtttgcctttaggtatatgttgagcctacatcatttctgcttctatatttattgagatattctttgttgcccttatagtcagtttgaaaagccgtcccatgtgtgtttgaaaataactttgctatatagacacaagttttctatacatctattaggacagatttgttaatcctcttatgtaatctatattctttcttctttttggtctacctgacatctattttgaggaaggaagctaaagtcttctactgttattgtgattttaacaatttcttctcatattttgattactttttgattttaactttttcaggccatgttattatatgcataatgatttattttcttcagtcatagatcatgtaaaccagaagtaaagatcaaataaaccaaatctttcctctatgaaacaaccaaacaactctctggccacttttatcctttcaacataagttctattttttattattaatttatcttctttcttttttgttaacatttgcctgaagcttcttttcggaatcttttttgtttttgactgttgcttgttttaggtgtatctattatattagaatatagctacaatgtctctcttttttttttttttttttttttttttgagacagagtctctctctgtgcccaggctggagtgcagtggtgtgatcttggctcactacaacctccacctcctgagttcaagcgattctctgcctcaacctcccaagtagctgggactataggtgtccaccagcacacctggccaatttttttgtatttttcgtagagatggggttttggcatgttggccaggctggtcttgaactcctggcctcaagtgatctacctgcctcagcctcccaaaatgtcttaatcaaagataaaattccatatcttatgagtgccttgaacccattcacatataatgtggttgatgatagacttactatcttaatgcatgtgttttatttattgtgcttatggttgaaaaccatcttcttcatctctggatcatcagagtcaaccagagggcttggctcaaagcagtaggtattcaacaaatgctcattgaataaaaatgtccttggtcctctaattctgatttgattcgagaaataacttatggcaaagagctcaattgtaatggggttgggactaaaattcaagttaatgttgaagatgtttccaagaagtatttaggttatattattaaatattagacactttctgtttatatagatttaacatataaagattttaagttttctgtgtatgtgaggtctcgtagtagtttctgctgaaaatgacaggggcgcggggataagggtgaagacagtatctcaggattggagaaggaaatctaagatattgtctccaccagccatactcctcatgaacatgcacatggaaggacatttcccagccaaagtgaatccctttatttgttttagtttcagatttgagtctcagatttctttgtaattccagctgcatctaccaaagtgctagataatttttttattttaagcaaataatattatgagaacattatctttattgcaaagtgctcctccagaagaacctctatgctggataaagacaaacatttgattaaggttatgtaagagtgaaatcaggatggctcacaacccattagccgtcattttcttactttaattgacaaagaaattgaaaaaatgaaagaagcatatgttgtgcttgaatgtgaagagtgctagactagaatcaaaggcctcttagatttggctgtgtcatttgggctcatgaaaacacctctggaaatctctttcagtgcaaaggagctggactagttgatctctcaggtttcttccaactctaaaatatctccagtctgtgccttggaaacatcttaggtgaaaatctaggaacagttaacctaatttgcacccttaaaattctgccatgagctgcttacaactcaaaacaagtttatcttactcagttactaattataaaccatccagatttcagagctgtgagtactgggtgaagcattgaaggtatgcttttgaagccattacatatggcagttactgagctgaaaggattaaatgctgcagcttccccagttgcccttcctccatgagagcagtgcctgcccccagcattctgtggcacttggaagacaagacagaggccaaatgcagatttttaccctgggcttccctctacagtgtggaactcaggttgtttcttctttcctccctgaaatgacatgagtttgcagcggatggtgaactgaagaaaccataggaggctctgtcttcttgcctgaatttcagttggaagcttggagatttggggttcaacagagataaggaagtgtaagccttcatcccgtctggtggttggcgatcacacaccgctctgtgctgaggctaatggccatgatcagagttgacctaaaaaaaaaaaaaaaaaaa

SEQ ID NO: 58259 - DNA, 871 bp, Homo Sapiens
cacaatatggagaggacattcagacatcttcaactgctcatctgcccctacggaccagacaggcttgaaactataggaagatgcatttgacctttcatttttcagttcagtagaatttaatatggactgtcagccgctgcggtgatcatggaagtagacctaagagaaaaaaacttgtgcaagttcacacgtggagtagtatatgaccatggtttcagagaactgaagcagttctttttagattcttcaaattaaatgtctccttggtgtatttaaacctgctgttactcacaggccaggctccaccaagctttcctacacacttcttcctgagctgtgaccattctcctgagcaagaggctgcagccagcctgggctggcgggcccatactgtctctcataggcattctctccccttgacctttcacctccgtaaattcaagagggtgaaaggaaatagagtgcactgtcaacagataattgggagagaaacacgaaaaggcctcgcagtggggatcttaaattatgagaacttgtgttttctgtgttgtgcctgctcctcattggcgtggatggttggtaggggcattctgcccgtagcgtctgaagtggtcttttggcaaaagattcggccccttcatgttgggattccaggacttgccttcatcctcaggttaatattctcctgtgattgttacaagctctctaaggcatagtcgcattttattgccttacagctgcgcagtctgccgcaccgtccagatacggtagtttcacattctcaggtgggtcagatgaccttgtttaagcgacttgaccagacattgttcctggatgctctttgttcccggaggctctcaagtctccccca

SEQ ID NO: 58260 - DNA, 853 bp, Homo Sapiens
ccagatctgtgtgcctgtggagtcctcaagccccctggtgatgagtaaccagaaggaggtgctgcgctgcttcactgtgctggcctgcagctcgcctgaccgcctactggccttcctgctgcccaggctggacaccagcaatgagaggacccgcgtgggcaccctgcaggtggtcagacatgtcatcaactcagctgtaatttcatagaatatcctgatgttggtcctgcagtgtcctgcagttggaacagagccctgctcctcaccacggcctttctgctcccaccagcaacctgggccaagctcccaccaggacctctccttggccacactcggctgcctgatgttggaggctcttccagcctggaatcatctttctgtggctcccacatagccagctctcttcctttgagtcttagcttcagggtcacttttcagaatagcccttggtgttgacccccttcttccagtgcagcacccccatgaatatgtttctcagcctctcgtctgcacctctcctgatgctgccacagtgtgtggtgatcttatttactgtccagttgtctttgtgtcttttccattaggacataagctacttgagggcaagccccatctgcttataagggctagcaggagttggctccccattaactgagagtgatcagatattgcgttagaaaaaacaaaacaaaaaaagggggggttaaaattcccgagggcaattagctaccgttttgggaagggccatggggggtaaagaagaggggggttaagggggggaaaagctggcttgggaaccctttgggaatgggaccaaaaagggaaaaaggtgggaacggcggatgtgtaaaaa

SEQ ID NO: 58261 - DNA, 2739 bp, Homo Sapiens
attccagatcatttctctccattccaggaagtttgcatagctccctggacttctgctttgcactgccctgcaggagtgggtggggaaaggaagtggctttgaggcacacagaggggcttggtgaggccaccggaggaagcttctgccaccaatatgggacctgtgcccagcctaccagaagagagcatctgaaaacatgtatcgacatggtaacccctctgcttgaagcctcacatggctccctattgccttggtgctgaacaccctatggctgaccgtggcccagcctctgcaacagctctgcctcctctccagtggtgaagacccagcctgctgagactcctcctgcagttcctcaacatgcctgcatttctgctgcctcagggcctttgcgaaggttgttccttgtaactggaatgcccttccatcccttttttattcaaaaggctgcaattttaattgaagaaagttcccttccaaggttcatgagttgcctgacttgcccaccggtttcctgcaagatcccttggcctggcacttagtgctcaggaaatatttggtgatgggccaactgagtgagaaggtgggatctggtgggaaggaaagcggaaaggtagaaattctgctcacttcctcattcccacctcccaaggaacccctggtgtccctgtggaacccgctttgggaaccggtggttcaggtcagccttttcactttgtactcaaagccacatcgcattgaagccacaggtggggcaaggtcatgcatgacctgagtctccaaatcccttcaccctgtttggttctgcaacggggattaggggagccccacgatttgttttcaaaggatgtccgggctccaggacaggatgccctgggtcacctgatgacaggtgtggtggttggaaagggcctggtttcagctccgggtacacttcctccttccttctgctgcgtggtgtggcctcttccacgtcctcagaatccagctgttactccgtccgcggcctctcagctctagggccctctgcacactggcccccccaggtaaggcctcttgtcccactttcacccccaacccggatcgcatgggtccagggaaaggcctcctggctccgagcctcctcccctcagcctcagtcctgtctgctgtaattcagagtgcgggtgggctggcacaagatccctgggggagggtctgcaggctgtgcagtggcctggcatttggccagcagcccctagtcgcaggcaggggtctttctggatgcaccgaggtgggctgaggatatgggaggtctggctgatttgccaaaccaggaggaagtgggtgtctgtctgtctctcttgcagagctctgcggtagaatcccgtgccccccgaccccatcagcagcctacaccccttcatccttcctggccccggattttctctgcctctgccactcccggtggtaaaagagggcttagaatgcggtttgctttctggctttgtttttttgcatcctgatctttgtggcgtggatcgatcattttccagggaaagtaccttgggtgagatctctctcctggactcccgttccccgtttcccccaatctcccctcctgaaggtcaccggcaaagacttcactgtctcctaggaagaggtcgccataaacccaggggccacatgataatatattaatattaaatgtatctctaaacattaacctttcactggcagcccaagagcccgacagcacaaaggaatacttggttaaaattcaacctccctcccagtccgggctctgagtgtccctcgagggctgtctcttgagtctttttccagaactttggtatgcgcctgtgctccagcctgggtgacagagcaagattccatctcagaacaaacaaacaaacataaaaagtacaggtgaagaagtagatttgcccatccaagatgttctgaaggtactcaaaagtttcccaattactgcctgtaatatcagtcattgctttttttctttttgagtatctgtttcttgtgtgcttttttgtggtttttgttttctgtgtttttattttttgttgttatttatttatttattttgagacacggtctcattctattgtctaagcagaagtgcaatagtgcaaccatggcttacagcagccttgaacttctgggctccagaaatcctcctgcctcagcatcctgagtagctgagactacaggccaccatgtctggcaaaataataataataaataataaaattcgttgtagagatgaggtcttgaggtcttgctatgctgctcaggctggtctcaaactcttggaatcaagcgatcctcccgcctcggccgcccaaagcattgggattataggtgtaagccattactcccggccagtatctatttttaagtttaaattagcattgggccgggcgccgtggtgcacgcctgtaatcctagcactttgggaggccgaggcgggcagatcgcctgaggtcaggagttcgagaccagcctggacaacatggtgaaaccccatctctactaaaaatacaaaaattagccaggcatgatggcacgtgcctctaatcccagctactcaggaggctgaggcaagagaatcgcttgaacccgggaggcggaggttgcagtgagctgagatcgtgccattgcactccagcctgggcaacaaaagtgaaactccgtctcaaaaaagaaaagaaaaaaaaaaaaaaaaaaaaaaaaaaaaaa

SEQ ID NO: 58262 - DNA, 1965 bp, Homo Sapiens
gaagtgagggctggaagagtccgcgcgcgcgtccacccaaggcggagtaagggcatgcgctggaaaggactgcggggactcgagggaccgcacccaggacacagttacgcgagtcggaaagacaccgaccagggaatgggcgacgaggcttgccttaattcggaggaaaccaaggacttgagagagccatacaatttgaaagacgaagcaccgtgaaatgcagaaagttgtggttcggatagctcagctgattaatttcatgttgccacagtttgtcagtgatttttgcctttttattttctcagttcctttaaaggcagtgcattcggtacttacctgataatgtgaaaaacgcgagctttagaaaaccgaataggtgtacatggtttactgtaatgacttgttctccaaagtaagagtaccaaacgctggaagcaaatagtatttcagtcattcgaagagtagtgcccaagcatttaacattgaagctgttaaaagggcaaagtaggccccaattttagatctaagccatcaactttatggaacagtcctaggggctttttgaaaaggagatttaaaaacacatttcagaggtggtagctgagttgaagaagtgaggaaagacttggatagggaggaaatagtttgacactgaaggatgttaggaagtagggattccttgtgcaacttaagagttttgtaaataagacggcttggccttgtgtcaagatacatcaattggttatagcttagtgcttggaggcccacattataggagtagactagttctccctccgccccgcccctggaaaatctatttcaagaccataaaccacattgctaatccttggaaatgcagaaggtggttaggtttaaaatgtggctttaaaatggtcctaacagaaacgtattgatgttactattcagaatatctgcccagtatacgaggaagaaaaaggttaaacctaaaacactaaaaattcatagttcatattcagttattagcctatgaagatttggtacagccttcatccttcattttagacaaataacaaatctatatggtttataagtgtattttgtaaggagttatatatatctatatatgtgtctccacccatctgaacctgacctgcaaaccaagaggttcttgtttatttccgatagttttggtagtcttgttaaaggcatttgattcaaaatccaaatttgcatacatttttccaactggatagaggaggcaggaatatatttgaatattgttctcacttattttgtccctcttcttattctttaaaaaaaaattaagcctgtcaattttagcagtgggggttgcatatcaattttagtgatactaatgttaataagttctgataacccactaccattggaccacccccactcttattcctaaaacgaatctgaaaataattagcttgctttaacgggaagaatgaatgttagggaaccaccctgctgaactccattttgctgtcggctctgaataaagctattttatccagaaaagctatctctggacaaatattttgaatagttcagtaaccgcaataggtttctgctagaaccattttgaagccaccctttaaccctaaccaccttatgtatttccaaggattggcgatgtagtttatggttttgggatagatttttctgggggaggggagaacctcccttctagctctctgcagattatcagagccgccactgcagggatttgctcccgtgggcctatatgtctccccagataccttcctaaaactattagcttttatctgtctgtgtattcccctgttgtgaatggggaagtatttgagggcttgtttttttaggttcttgataataaatacctcaggtttcacagagtaatcaaactaaaagaaaacttcttttttatttcattttatttttttgaccgaaactccatctccaaaaaaaaaaaaaaaa

SEQ ID NO: 58263 - DNA, 860 bp, Homo Sapiens
  misc_feature (19)..(19): n is a, c, g, or t
  misc_feature (267)..(267): n is a, c, g, or t
  misc_feature (806)..(806): n is a, c, g, or t
attctagaggccgaggggngtcgacgatgctcatgtacgtttatctgtattcttgtgtctattatgtcttgtggtcacgtgatggaggtagcgctcgagatcagtagtatcttacaggcatagggatgtgcctacaacaccaagttattacacggcacagggaatagatccgatgtcgttttctgcaacccaaattggagactgagagtgtactagtccgatcatttcacatgagaatactacttggaacgaccgtgtatcaccagntggtgccatacagaatcctacacttctaaacgttcgcacgttacccgattttacattgtaaaaactaaaagtggtgtaaacttctcaggagagaaaacattcgtggtgtagactcttggttacctggcacgggtttcatagtaccaccttaaaagcacaagtgacaagaggaaatataggtaaattgggactttatcaaaattaaaatatttggtacttcaaaatacgccatcaaggaagtagaaaagtggccaggcataggggctcgctcacaccgtgtaatcccagcacttggggaggccaagggtgggagaatcacctgagcctaggatttcgagaccagcctaaacagtgtagtgagacctcgtctttataaagaatttacaaattggcctggtgtggtggtgcacatctgtggtccaagctgcttgggaggctgaggtgggaggatcactgggtggccaggaggttgaggctgcagcaaggtggtaatcatgcctaccgtgggcatcagagtgagacccgtgtctcccgaaaanaaaacaaaaaaaaaaagggggccaaaatgggggggaaaaatgggattaaaatgc

SEQ ID NO: 58264 - DNA, 2021 bp, Homo Sapiens
cgtatttttttggactcactttctttgtagctgcctctcttccaggatttacccactaagtttcttgctgttctgttagcccagaactctgtatccttacatttcatgcaaataaggttgtggtattcttcaccaagtagcaggaggattacagagcaccctcagacaaaaacccaccaactcatgaatttcacaagatagttatgttttaagaataggctctcctccagtttgtctgcttttgatcactctccagtacctttaaagaaaaattaatgtattttgtccagatattatcattgttatctataggaaggtaactctacagtattgcaccattactagaagccagaatgccacgttacttttactacataaactccattctgaaaatgacttaactaggtaatttatgctactattaggtatatttttcctttttattttagtagcagctttattcagatataatgcccacgccataaaatttatcctaaaaggataagttccgtggtttctagtacagagttgtataaccatcaccactacctaattttagaacattctcatcaccacaaaaagaaatcacataccctttagcatttgttccccatgctccttcccacaacccctggcaatcactaatctactttctgtatcaatggatttgattgcctggacatttcatacaaatggaatcatataatatgtggactttcatgtctggcttcttcacttagcatgtttttgagattcatccatgctgtagcatgtataaatactttactcctttttattgctgaataatattctactgtatggacataccccattttatctacctattcttccattcaaggacatttgggttgtttccactttggggatattatgataatgctataacaagcattcatgtacatgtttttcatcttttggacacatacctaagaataaaattgctaggtgatatgggaactctatgattaacatctcgaactgctattttctaaagttgctgcacatcctaccagaagcgtattagaattccaatttctacttatccttcccaatgctattatttgtttgattttagccattttagtgtacgtgaaatgatatctcttgcttttgatttgcacttccctaatgactaataacattaagcatcttttcatgtgtttgttggtcatttgtatgcctccttcagggaactgtccaagtccttgcccctttttaaactagactgtctttgtattgttcagctgtagttctttacaaattctggatgttaagtagtacctttaatggatgtatgatgtgcaattttttcctcccatttgtgggctgctttttttttttttttttttttttggagacagggtctcactctgatgcccaggtaggcatgattaccacttgctgcagcctcaacctcctgggcaccagtgatcctcccacctcagcctcccaagcagcttggactacagatgtgcaccaccacaccaggcaaatttttaaattctttataaagacgaggtctcactacactgtttaggctggtctcgaaatcctaggctcaggtgattctcccaccttggcctcccaaagtgctgggattacaggtgtgagcgagccactatgcctggccacttttctacttccttgatggcgtattttgaagtacaaaatattttaattttgataaagtccaatttacctatatttcctcttgtcacttgtgcttttaaggtggtactatgaaaccagtgccaaggttacaaagatctacacagatgttttcttctgagaagtttacacattttagtttttacatgtatatctttaatcaactttgagttggtttttgcatactgtgtaaggctccagtattctcttgtatgtggatagtcatttgttccatttgttgaaaaaaaaaactattccttccttgtaatactgttttgccacccttgctgaaaatcaattgacctacccacctaccaaaaaaaaaaaaaaaa

SEQ ID NO: 58265 - DNA, 456 bp, Homo Sapiens
tttttttttttttttttttttttgagacaaagtctcattctgttcacccaggctggagtacaggggcgcagcctcggcccactgcaacctccgcctcctgggttcaagtgattctcctgcttcagcttcctgagtagctaggattacaggggtgtgccaccacatccagctaatttttgtattttagtagaaacgaggtttcaccatgttggcgaggatgggctcgaactcctgacctcaggtgatccgcctgccttggcctcccaaaatgctgaaattaaggggtgagccaccacgcccagccttgacttactttttaacagcctcccttggggtgccagcctcccttggggtgctgtgtaacgaatagactgaaaggagttaggagaagtcacatggaaaaacctgttgattagtgacatgagttacagcacaattgatggcagctagaggggg

SEQ ID NO: 58266 - DNA, 2981 bp, Homo Sapiens
aaactagtctcaatttaataaaaagtacccatgtaacttaactgatatttacatgtagtagattttttttcaaaggttgacatagggaaagataagggaaatgatatgctggttcttaatgaaaaagggaatgtctttttgtggtctactaattgactgctttaagaagagaacctactgttagttcagtggattgttaagttctggagtagtgttagtttagaagcaataaaggattggttgctaaaggtaaaaagcaaaccttaaaacaataacctaaaaacaaatgggaaggttctgggcagagaattaacattgttaatgcagttcagtttcagttttctttttgtcatacagcagagctaactatttcctggttggttaatggaaagatgttatgctgtatcagctggaatctagctttgcttatgaaggtgtaatcacataggtgaaagatgttgattactgagttttctcacaccatatattaatcaaatactcttatttgggttgggtttctagagggaaatttcagtttgacttttcatttataatttttccgtttggttctaaacctataggggacattacattcagtacacttcatttttaaagaatatgttgcttaacaataattctagatcctgggattggatatctatcagatcccactcatatctccacagtgtgaaattaacaaaaagatatagttaaatactcagtctctatttagaccgaataattgtttttctcagctggacacattttccagccattcggtttttgcctgccttatgtatttaggtgattattcttctaggtttatcaagaaactgaggagtacctttttaggattgttgctggaggctgttgaaacatagactagcttcaaatttgagagtcagattgattgataaaatatatctcatgctgttaccgctgaataaatgacttttgctggtaaagtagtatgcttttaaaataatatgaaaaaattctgaattaaggttagtaatttacactgtaattgattttaggtgttattatattacttgctaataagatttttttttctgggaatagaagcttataaaaatttaaaatatgtttaattttctatatagctccatcaagtatgatggtgaaggatgaatatgtgcatgactttgagggacagccatcgttgtccactgaaggacattcaattcaaaccatccagcatccaccaagtaatcgtgcatcgacagagacatacagcaccccagctctgttagccccatctgagtctaatgctaccagcactgccaactttcccaacattcctgtggcttccacaagtgagttctagaatcagatgtagtcagcaagttgagttttcctaatcattgcttatttatgtgtagtcacttggggggaaactccaagtaagtaaacattaaaagtaactgtagtatctttcataggtaaacaggtattaaacaggtatgcacaatcacttggaatttaagtaatggctttgattataatattgatttaaattaatgatctgatttatactttactattacatgtagaagtaagtagcctcttaagctcccagatatattttggagaaatatttaaataattaacaagtagttttgatccaagatgtttatgaaggtctgtgttaatggaattgcaacctttcttttaatgcggtgttcttattttggtttttgtgggacaatattaccttatagtagttgtctgattttctcactgtgcaaagggatcttgacaaatttgttatatattgctcaagatagacattaattaagtcaattttgatataagctaacttctatatctctttttaaaatatatgtgtaattaaaaaaaaaaaagtgttttagaaagatccttcttttctgccatgtcataggagggagaggggctgctaggttcaggtttttgggggcatgatcatatgacctggttctgttacttattttcacagtaaccaaaggtttgatagtttgctgcttggcaaatgaagtagcttttttttcatttttttttttttcaattaatcatagagcattgtcttggcatgtgtatggtgttagttgcatgcagttgctaaaggaatttatgtaaacccacatcagaatagatttttgacagctctgggctaatactgtgttagttgctaccgaaagtaccattattgtatttgctttactatcagattagattcaacatagaaattttgatctttggaataaatgggggactgatttctgtaattgtgagttttcaagtgaagtataccagaatttcccctttaattcattacaccacttcaaagcaacatgtttttggtttgctatctaagagatgacagtctcactataggcagcatattctaaatgggtcatataggttaagcacttgagaacccagttccttaatcacttggtgcttctattatctgtctactttttatttaccaaattaggaatatggttgacaaacagtgggtagtgatagaaaataaaagaaggtacattatagccacttgaacgtaggttagtgctagagcacagctacctacttctgtttatattatctggagattgaatttctgtgcctttgtcaatgcttactaaagtgacttcattttgactgtgttgtttcctgaggttgaatcctattcaaagattagaaaaagtgatagaaatgaaatgcagctaattttatcctggtatttattgggtagattttaataatcgaataccgtaaatactgtaagttttagaacttgtgtcaaaatgttcccttatgtggtggcatgcgcctgtagtcccagctgctccgggggctgaggcaggagaaatggcgtgggcccgggaggcggagcttgcagtgagcagagagcgagtcactgcactccagcctgggcgacacagcgagactccatctccaaaaaaaaaaaaaaa

SEQ ID NO: 58267 - DNA, 331 bp, Homo Sapiens
cagttattctgtgattctgaggcagtgccatctggctaccacccttagccaagactcttttacctgggatggttagatatcaggctgctgtgtttagtaaattgaaacactttataatgtgctttattcagagttactgagttctgaatcaggcctatattccagggccattgctataattgcctattagcatatacagacagtttgaaaaatctgtttatttgagctttttgcttatgtggactttggataattgagcaattcagtatattacatagcgggagtccttgtgcctacacatctctgagcctgcagagaatgactctcttca

SEQ ID NO: 58268 - DNA, 816 bp, Homo Sapiens
  misc_feature (652)..(652): n is a, c, g, or t
aatcttagaaatcatatttctttttctttcatagtcttttcttgtgtacgtgttttctttcactctattcattttttgctcagctatcctcctgtaacctcataacattcttaatgaagatgatgggatggtaagtgtctggcaaagcgggagataatatctttttccctcctgtattctactgaactcattgttccttctcagccttacttaatcaagttaaacttatacaccacagctctgcatttagtttcctgaccctgtgggttaggtagaatttagatacgaaaatggctggaaagatttataaaaatctattatgttaatcattggtggggaatccataacatggcatagaacttgaatgtatggatttgagaaaaaatatttacattaacttaattatatgatgatggatgctaattgataagcagtaggttgaaattcactgttacataattcactattcatgtcatggttgctggttgcccttaactgaatgattttgaaggaaagctgataactattttgagttaaatttttacaagtggttccttatatggtgcaatgccgctgcaacaaacagtaggaattttgtagcaaaaagtcttaatagtatcccatttaaataactgctgcttattttaatgcncatcagtgctaggcccccatctaaatgtggattgttcacggtcattaatttttcacaattctacaatggctttccgaaagaggaaacaacatttaggtaaacgacttactaacatgattctcttagtagagataaactgtggttcaaatctatgtaggcctggt

SEQ ID NO: 58269 - DNA, 2120 bp, Homo Sapiens
aaaagttctcaaactttattttaatgccaaccacatcttgtttagaatccacatatgtaaaacatgtaaaagctgagctgctgatcaggttgagctgaagcaggctgaggagtcctgcaatcattcgcccctaaagctcctgcagagaatcttaaaagttcttggagattgcttctcccctctaactccgttgtagtagagatgagaaaatgaatgatcaggaaattaatctatatcagttagttctttcaagtccttacaaacccttttctagaacttctttgactaaccccattttctcctgtagctgttcctgtaacgttttatataaacatagtgcttatcattttgttttatacataaatgtttgtgttgtctccctcagagtccctaacctcagtctattttttaaaattaattttagatcctcagtgcttaatgtaatcctagtatatagtaggtagttaataaatactgcattaaaatgaataaatttattcaatactttccatggaaattatttattcagtttgtagtatcattttgcattcttgatgtcttaatttcgaatggttctctgttaatttctgagattgtttatttcttcaactacattgtcagctttttaaaaatctttattgcctactccccaacataaaacccagaataataggagtattttggttaaccaaagagaattccatagaaaatgtcatgataactgtagctttacttccttcttactacctctcaaaatgttcctgatgtcagctagtaagagtgctctgctctttcttttatgaggccagtatgtaaagaagcagtgtataactgaaataatgtgaatttgtctccaggatctaccacttattacctgttgaccatggtcataatatcgaacctctctgatgatgatgatgattattattattattattattattgtgagatggagtcttgctctgtcgccaggctggagtgcagtggcacgattttagctcactgcaacctcctcctcctgggttccagtgattctcctgcctcagcctcccgagtagctgggactacaggcgtgcgtcaccacgcccagctaatttttgtatttttagtagagacagggttttaccatgttggccaggatggtctcgatctcttgaccctgtgatccacccgcctctgcctcctaaagtggtgggattacaggcgtgagccactgcgcctggccttctgattcttatttctgtcatctataaagcagggaaagtaatatctgccttatgataaataaagaaatgacatattatgtgttttaatgtatgattgtattaaatgtaatgtatgttacaataaatatttaaatattaataaatatcatttattaataaatatttaaatgatagctgatgtcatatacaagcaggtgtggtgaacctactagtggtgtttaaattttaacatgagtaaagatcaccttgggagcctgttcaattgcactttcgggtttagtaggtctgagttaggacctgcagtccttcatttctgataaactcctaggtgctgctgatgctgtagtctacagagcacacttggtgtagcaggcactggagtattcaagattcccttgttatgcttttttttcttttaacatacgttgaatgattggttggactgtctttggcagttattttatatcttctcagatattgtgactgtttttaaggtagttaacaataatattttggactcatccagtgctttgttttgaaaacttttttgttacaatgccagggacacaatatttttaaaaatattttgtagtgctgtatatccaaatattaggggcaaacaattaaggtagacatgatgatcttatctacttttgtaggtaaataggtttattgaatttgaaaggatgccaagcaaggatttatggcatattaaggcagatcaagccaggaatggtggttcacacatacaatcccagctctgggaggctgaggtgggaagatcacttgagcccagaagttcaaggctgcagtgagttatgattgtgctactgcattccagcctgagtgacagactgagaccccgtgtcttaaaaaaaaaaaaaaaaaaaaaaa

SEQ ID NO: 58270 - DNA, 2018 bp, Homo Sapiens
gggtttctccgcgcggtgcctgcagggctcccagcgagtggcagcttgggaggggccgcccgggcggtcagactggcacctgagcagccaccgcgtcccgagcagggggcatgcaccattctgagcactgccagccctctccagtgaggagaccgagtggagaagcatgcaaaagctcaaagtttcccatctctggcctcacttcgtgtttcaaaagtaaacaaataaaccgcagctgagaagggaacaaagcccctggaagtccagcccggggccatgtgggctgtggaaggcacagataagttctggggaaataagtgcgaaacctgagggccttaatgggaaggaggcccccaggatgcttgactgttgtggccagagtgcccccaagctcttcttggcagaccggcaggatgtggcccagccatctgaagcaggctttggtgccacagggtaaaggagggcacttcaggcctgattccacatggcctcaggcctccagagttcactcttggcaagggcctggagtgcaaagacctgttatatttgtgctgagagagccaagtgcctgaagaggcaagcatggtctagagtttgactcagaaatgaataagatagccagcttttgagacacagcgcctttgctactgggaaagacagcgtgctgtggcaccctgtgggtaggagggagccaagagagggaagcaaacaaaatgagatattgaacgtgcagtcttcaaaactcctggagaaaaaaccttgcttttccaaagatagtgagggctctgaatgcctgaagaaccattccccagcaagaatttctccctttcttagtgaaatgaaaattccaattccaaaccataagcggaggactgtgggaggaactgagtcagatgtgtgcagatttaaaaagaagatacccattgtatttgagagcagggtatgaaaaataaaaatgtccagaatgaacgaagccgtaagttagggttttgacagaaccagttctcctaattgtagcaaacagtgctgcagaatctgaaatgattttgaagtctgtcatctaacttttgctttgaacacctcctacacaaaagaaaattaaacaacagtgattcccctgacagctttgaatctagaataaacaactgggccacagtgaccaggtaacacagaccagggtgcaaatacaaaacaacaaataataggctatcattgtataagcaatactgtgagggcttcttttgtacctgggaaatagcaaggagcctctgaaaataatttgggtgatggaaggagctatctattgtcctcaggcagggaaggaggcttttataactgagtgtgcagtcctgaaggatggccaggagggaatgtggtctaaatggagacagccttccaggcagagggggaggactggactgtgggcagcagtgagaggttccgccctcgggaatcaggaggtgggaggtatgccgaagccagaactcagatatctaaagcttcgttcctctgagctgccaaatttgccagttgtttttggctttagagatagcataaaacctccctccctcccctccctccctccccacttccttccctctctccctccctccctcccttccttccttccttctttttgaaaaataagctctggccagttttattaaagatttgcatgatttattttcaccagtctgttctggcatgcttccaaagatctcagggctgggtgcagtgcctcatgcctgtaatcccagcactttgggaggctgaggtgggcggattgcttgagtccaggacttcgaggccagcttgggcaacatagtgagacctcctgtctacaaaaattagctgggcatagtgacatgcacctgtggtcccagctgctcaggaggccgaggtgggaggtggatggcttgaatcttggaggtggagcttgcagtgagccgagatggtgccactgcactccagcctaggcaacacagtgagaccctgtctcaaaaaaaaaaaaaaaaaaa

SEQ ID NO: 58271 - DNA, 3298 bp, Homo Sapiens; identical to SEQ ID NO: 24631

SEQ ID NO: 58272 - DNA, 1849 bp, Homo Sapiens
aataaaagagatgtatattttttagtctgctcttcctccctgataatttcagccagttgtatttctctattctaaaaacctggtatgcttggatttaatctcaccactcctatctacgctcctgctcctacccccacacccatttcccccaaaaaaaccccacatctgcacagaccctccttcccaagaaaacatggaggcgggctgctctctgataccgtacatgtgcattccgactgtgctgaggaaggtcatagaaacatgagagggctctgctgttgtcagttgtaaagactgccaagaaagaacaacaaaaaaatctcaaatgcattcacatttctcccgcctcttttttcttctgtaaatattcaaccctttttagagaggcttttgataatgtgttatctcagcaaacaccacaaaccttggatgtacgcagtactccctaatcccataggaatgactcagtcaagagagttagatgaaatatggttggcaagattgggtggggaatcttgttactacacacacatacacacacacacacacgcgcacacacacacacacaccagcagcaccagccactgcacccctatcatcgccatagacattatgtaaaaactagacattctcctctcccttacacagtcagttgcatctttcccaaaaatggaaggggaaaaagctttctttggctgagccatatgcaaaaaatcatggaacatctgtgtaagtaacaacatacaacaagacaaattattggtggtaaaaggcaaagcccttgtttcaaaaacatgtctggaaatagtgtgtatacagaaccttcctttgtgctaattactcataataactgtcagctttgtgtaccacaggctgggctgttaataactagtggtcgcagtacggtgttctttttctttccctttctttttttttttttcctatccttccttccctctttcctgccttcttttcattgttgttgcacaaatcatatagccttattccaatagttgctggaagaccaaatcagagatgtgggggattcagggactcgcgacatcttggagtatactagtggataaatgccacttcacccctgatgtggccgtttccctccaacacttgtctaaggagtgcagggactttggggtccaagcaatgtatcagtaaacttcagaatttttttcctaacatttaactctattctcagtctcaacacccgccacaaaaataatgtcactccaggcaaatttagtcgcttacggattctgagtcttattgtgattttgcctgagtggcaagcttttcaggcacgtgtacttaaaaatgtgatgtggtagaatttgcctccagctaggaatccacagacttgggtttgagctccacgtcccacagtcaccacgtgatcttcagaaaagaatcactgaactgcctgtgcctccatgcccccgtttgtcaagagggaggtggtaatacctgctgcggtttttatgtggatcgaatgggcctaaaactcatagaaacacagaatgcttctatgataagagaaaactccagccaggctcagtggctcacacctgtaatctcagcattttgggaggccgagatgggtggatcacctgaggccaggagtttgagaccagcctggccaacatggcaaaaccctatctctactaaaaatacaaaaattagccaggcgtggtggtgggcacctgtaatcccagctacttgggaggctaaggcatgagaatcacttgaacctgggaggcggaggttgcagtcagctgagatcgtaccactgcactccagcctggaggagactctttctcaaaaaaaaaaaaaaaaa

SEQ ID NO: 58273 - DNA, 1211 bp, Homo Sapiens
agcggcggcaccacgccctgctgatttttgtatttttggtagagacggaatttcaccatgttggccagtctggtcttgaacttctgacctcaggtgatctgcccaccttggcctcccaaagtgctggaattacaggtgtgaggcacaacgcctggcctaaaaatgctaaaataatttaagccaactttgaggaataactaccttcaaatgatgcattattaagtatatggttatataagttttgacaaatgcatatacctatggaagcatcactaccatcaagataaaagaacattccatgacccctaaacactcccttgagcccttttgcagtcaatcacccttttcttaccaccctaggcaaccactgttctttctataactaaattctatctagaatttcatgtctacaggatcatacagtaggtactcgcgtctatcttcttttactcaccaagtttttgacactaatccatgttgttgcatgtgtcagtttgttcctttatactgcagagcagtatagtccattatatggatataccacaatttgtttatgcattcatctgttgacagacattcctgtaaagctactataaatattaatgtgtatttctgtaaacaaacgttttcctggaattgctgggtcacagggttaagttttcagaaactgtcagttttccaaagtaatgtaccattttactctcccatcagcaatatatgattatttcagtagctccacatccttgctaacaagtggtattgcctattttttcatatatttttattagtgaattgtgcttttaaaaaaaaagcgttatgtaaaagatttgtgaaattctctatatactgatccaagtcctttgttaggtattttctaatagtattttctcccagtctgtgagcttgccttttcataggtgtatttttaaaaccaaaacctttcaatattaatgaaatagaattttttccctttatgattcctgttttgtgtgtactaaaagtctttacccatccttgatcatgaagattttctcctgttttcttctagatgttccattgttttatgtttaaatctatgacctacgttatatgccttttaaatatatgatacatatagaaaaataatgactttttattccatacagaaatacagctgttttgttgaaaaggctccctttacaacggcacctttggcaaaaaaaaaaaaaaaa

SEQ ID NO: 58274 - DNA, 461 bp, Homo Sapiens
gttttgttgtagatggaatagctaacagctatttttagagaatcagcaaaaatccaatctttccaaaaatatctctttcactgctcctaaaattcacatttttagaatctttttgtgtgtgtatgcagtgtttttctagaaagccttttttaaaatttatttatggggccaggcatggtggctcatgcctgtaatcccagcacttcgggaggccgaggtgggcagatcgcttgaggcccagagtttgagaccagcctgggcaacatggtgaaaccccatctctactaaaaatacaaaaaatgatctggttatgatggtgcatgcctataatcccagctactcaggaggctgaggcaggagagaatcacttgaacccgggaagtggcggttgcagtgagccaaaattgcaccactgtactccaacctaggcaacagagcgagactctgtctcaaaaaaaaaa

SEQ ID NO: 58275 - DNA, 812 bp, Homo Sapiens
  misc_feature (797)..(797): n is a, c, g, or t
gggggttatgacaagtaactggacttctagggaatgggatggcaggtggggtgctatcagtttataaaattttttgtaaccttttctcttatttctgcttccctcccccagccatgggaacacaagataaatttggagtaggtgagggtggagagcaaagtgactccctgggctgtgcccttcacactggttttagaaagcatgcagctgactgccctggggtctgatctatggtgctgtgctcgagagaactgtaaggtctgctgtaagtgatgggggctgtggacttatgcagaagtgcacttgttgggggttttcacagtacccaccttattatactagagaggcaggtttcattgcttaaggggacaattcatggcaataggcttatctccttgttttagctctttatgtttttctgcctttaataaaatgtgaagtcacaacgcaattaaatagtagtgtagttttcaggcaggaggtggagaaaggctaactagggggaaaaggccaacatgattgacagaggctggctggagatttacattgagaataactcgttcttcaaaactttcttcattttctggtgagaattaaggacaaatcatataccagaaagatggatgattaaaaatgtaggagttatgatttctttttgacttttgtaagtctctaaatccctccaccttaacatagaagttctcatttcaaaatggggaaccagccctgccagaagactaaagtgaaccaaaaaatactcctaaagtcttaaatagttaataaggggtggagattgntttatattttggcct

SEQ ID NO: 58276 - DNA, 2257 bp, Homo Sapiens
agcgggggggtgggggactggggagaaggtccttgtgacacaagcatgggaaatctctattctgaaaaaaaaaaaaaaattcacatatgtcataggtttttgccccctgatctataagaagaaggttctcgaacacaaatcacgtgtagtgcttctgaaagcaaagagttcagggcccaagaatgtgtgtttctaagaagttctcaggtgctgatggccggtccccacaccgcatcacgctgcctcgtatccgcttctgagaccctcaccactgcacacttctcttattgtattgattaataatttaggaatgtagaatgtcttaggcctactgtcatactttccacatgggacattcaaaatgtaaataactctgttcataactaaaatatattcctagaggcattctcatagctagattcagtcttctaaactttctcaactgtaaaatgggaatgaagcttacagggttattcctgtaattatctaacttaggtttatagaaacatgagggataaagcaaatcattgtaaaataaatcctgttatctccatagaaacattactttaggattgctttcttgaacatggactcaaaaaaaaactgtgcaatcaaaagcatgttatgaaaacaacgtccaaagaatcctaagtctaaaagtaacacaagcgtgatctgtgtcctataatatgggtataccctgcagctctacacaatgcaaatgttttgctgataagcctaaacaaaatgaagtgcggagagcatatgatgaattccacgccatcataaacttgaccttgcattatggcacctgacatgcttgtcagcctaaccctcaacaggcacgatgtttgctccctacatttttgcaggtttgggagtgggagtaagatgatttgggtaaccaagtgccaactatctaggaagactggcattgaggtcttctctatctcacgatgcgtttatttcaacaagggatttcacaataatcccattgcttgtaaaattgcactcacaattatttcaaaaacagccagtttcacattttaatatttgaatacttgtctggcgtttggggcatggctgtctcgtgaatgtccttcctcttcacttttttccctctttcctcaccttccacaccccaggacactttgtgtggtcttaaagcagcagcagttgcatttcccctgtgcttcagttgtgtgtgttggatcaagagctttgttgacaggcaattgtaggatgtaacttctgggcagctggtgtttttagccttttttcttcccttgaccttgtcagtttaggagtggatgcatctagatgtgggaagccatctagaggtctctgaacatgtgtgatagtaagtaggtagcgatgtttctgcagctgctcaccacccacccagggaaccctggacctggtggaggtaagaggaagacagaaagcaaagcaacgcctgcagcataccccaaccctaaccctagccctgcccagccctgcagccaacatgggcttcattctcacaccagtgcagaaaggcaagttttattacctctactttatgggaaactgaggctcagaaaagtggagtcttgttcggggtcacccagatggaacctggattgaggcctaggtctcacctgcctgattttcaccgtagaaagtcagaactacctagagaatgaaatcagtaaaatacctaggaacaaggtgtttgttccccagcatttcagctgggagctatttccctgcacagataggctagtgagttttatctatgctgaattatcctatggttccaccaaggtgacatgtagtctaagctgctttaggtgtacattattaaaaacgagagcctaacagtcaacaacagtggactgcttcctagtaaatctgggtgactaactttgcctgtgcccaatgttaaccctcgaggtaacactaagtgttgataatcacacagacattatcaaagtgtccagtcatcccagtggctggaaatcggatctagaactgaataccaactgagaccgcggaagtctcagcggtcctgatggaatctgaaagtctgtccctcccacagctctagctcagttcttcctccctctctttccttttctattagtttacaaaaggcttctttaattacccaagagatgcttcagagtcagctgactttccttgcagcatttcacatgtttacccaatttttctctggctctctcaatttgattaattgcaaaaaaaaaaaaaaaaa

SEQ ID NO: 58277 - DNA, 424 bp, Homo Sapiens
  misc_feature (350)..(350): n is a, c, g, or t
  misc_feature (424)..(424): n is a, c, g, or t
aatcacaggacaatgcttacataaaatggctacagttatccattatgaaggcaccttataaggaatctatagtaacctgatcgtcaccatttccttgattagagaaggtggaagcgggtgacacttagtcacctgtgtaactatattgaagagacagattcgctttgttccttggctgatggttaaaacaaatgaaaacaacatttgctgaaatgccacaccaatactcccactaccaaaatcaccatgaccgtcaccatcccatcaccatcattatcaccagtcaccatcaccatcaccaccaccaccactgccactatcgattctaaatgcttcagttcttttttggnggacggagcctcgttctgtcgcccaggctggagttcagtggcacgatctctttaaaaaaaaaaaattaaattcn

SEQ ID NO: 58278 - DNA, 418 bp, Homo Sapiens
  misc_feature (402)..(402): n is a, c, g, or t
  misc_feature (411)..(411): n is a, c, g, or t
gcatatcctttggaattctacaatactaattcctaggatggaaacacagagattatcttagatttgtctttacccttatgtctaatatgtactaaaaagttttactttctggggacaataacctgtcagattgcctatagtttccacttttggttttggattaccacatcagctttctagtggatcttcctgtatgcaggctttctaatgcatactgtgtattactgctctaatcatcaaagtgcttaccaaaagcagatgcaaggttttgactagaatgatggatagagaaatcaagcaagtacaaaactaaagtctcaaactaggtctctcaacaaatttattcaggaataagttagaaacaggactaaataataaaatccgaattggtatcactattanggaagaccntagtaga

SEQ ID NO: 58279 - DNA, 666 bp, Homo Sapiens
atctttttttttttttttttttctttctttccttctttctcctactctttccttctctctctttctgagacagggtcttgttctgtcacccaggttggagtgcaatggcacaatcatggctcattgcagcctcaatctcctgggctcaaaggatcttccctcctcagcctccttagtagcagggactactggtgcgcaaccccacaactggctaattattgtatttttttggtaggatctccctatattgccaaggttggtcttgaactcctggactcaagtgatcctcccaccttggcctcccaaagtgctgggattacaggtgtgagccactgtgcctggcccacattcttattactaattacaatttctctcttctgtgaattggctggcattatcacactgccatgaattactcttaaacagtacctttaccacagaaagaagtgttgataatgcagtcagaatagctggatgatgctataattttttaaattaaagcaaattttaaaaccttttgacctcaatgaacatttcaaaattaaacataaaataagaatcatattacctaagtacatacactatttaaataccttttacattattgacatattatacaagtatcatatcatataccagttagctaatacttggtgcacttcagat

SEQ ID NO: 58280 - DNA, 549 bp, Homo Sapiens
aggggatatcctgtggttgagtcatatacttgtttgacaacagcgggaagaattcatccactatcctgtagagaaatccagaggtaatgtatgatcacaaggtatgaagatgccattttgttggttcctgaaaggagcaaatgctcttggaatggacagcatggtttcattttgtgtagtaatgctcttgctaagttctagctcttacctttggttcaactctgagagcatttagttccccatccccaacccagccaatgcaccacccatgaaaatctacattggaattttgatcagtcatattgatatgacagattaaattaagaaggattgccacatttgtaggattgtcttctagtcaagaagagatacctacccatgtaccagattggtctttttactcagtccgaggtggaattatagttatcttcagtaaggccttcacaatttgtaaatacttttatgttgtgtaactgttctttttccatcatattcatcagcttttccccattgagttttgattcaataaggaagacaaactatggatca

SEQ ID NO: 58281 - DNA, 445 bp, Homo Sapiens
cttttttttttttttttttttgagacggggttttactctgtgtcatccaggctggagtgcagtcgttcaatccctgctcactgcagccttgacctcctgggctcaaacaatcctcccacctcagcctcccaagttgctgggattttaggcacacactaccatgcccagctaattttgtattttttgtagaaatggggattcgccatgttgtccaagctggtcgcaaactcctagactcaagcaatccacctgcctcagcctcctaaagtgctaggattacaggtattacccctggggaaagaatcttttaggttaccttgcaatgggaaggatagaggccggttcagttatctgactacactcatccagcacaactacaggaaatttaagatcattcatgcatgggaatgggcaggctgcacaggtaactccaactactcgaacc

SEQ ID NO: 58282 - DNA, 2241 bp, Homo Sapiens
gtcattcaataaggaacctcttcttatgtctcatcaagagtcctggagtctttacagaaatcccccagatcttcattggcaggaccaccagttcatattgctcattatagtgacttctgtgtgtgagagcaccatgaagggagcgtcacaggctcaggcaggcaagggctgcaggaagagtcccctcaaaggcagtacagaccacacaggccacagagaaggaaacctggagtccattttgcacatcttgcactgtgccaggcactttactcacaccaccttgttcagttctcacagatattcatgagagagctaggaggtgcccacattgcgagtaccagaacataagtatcagaccccagtcagcctaacttcagagtcctcattctttccacttcatattgcttttggagttatgatcagagttattagtgtcacttctcccactttaaaacacctacaaatagccagcctagaggttgcagtgggcagataccccagttgccatttccctcctttctggatagccagggatttccaactgtgtggtgagagaggacggagtcatcaagtcacagtgctaccgtagccatccctctcccagcactgagtgggctccttgccataaagatgtggcagaaaaccagttcctagtgctgctgaatttttaccagggcagagggacataaaatttatctttttctacataaaaattattcacatgttggttagatcttggaccagtccagagaataccctttaaagtagtttaattatagttcaataattcttcaaaatcattttgtagaggaaacagtataacagttaagtgcctatcatctgaaatcagactgcctgggttggaatcctgcaactctgcatttcattagctatgtgatgtgtagggtaagtcacttagctgctttgtgccttaatttccccatctgtaaaatggggataacatcagaacctattttgtagggttgatgtgaaggctaaatttgttatttcctgtaaagcatgtagaatagcacacagttaatacacaaatgttaactacaataattggtttctggttattttcccattagaatatgagctccatgaaggcaggggcttgtatctgtttcattttccgctatatccccagaatacagaacagtaccctggtgcatagtaagtccttgataaatatttggtaaatgaatgaatagagtaaatatatataatgaagtttttggaggcggtcctgaaaacacctaaccacatactgaggattccaaaccaacaccgaaacagctctttccctggtttagaactgcaggtatagtcattttccttgagcagattagttctctttcatgagcctctgttttctcactggtgaaaatgaggataatcccacctactccacaaggttagtgtgagaagtagatagaaacgtgtgtaagtcctttttaaatggaacagcatgatggagaatagtggccatggctattgtcagactgtttgagcagtttgatttcaagattggctgcatatattcttgaagttctcataaacaccaaattgtttctgcctttacagaaattagctgggaagatgcatctaggagctcattccattattcattacatattaactgaacagttacttaatgttaggccaagtgcatgcaggataaacaagaccagcacagtgccagctgtcagggcagttcagtgaaggggacacacacactgtgctgagagccagagggtaaaaggaagaggctccgtgaagaagtgagaatggacggaatcacgtgtgcagagacactgagtcgcgctagacactccaggatacatttgaagcatgtttctctgctacactgtactgacagtagtaattgtaatatgttcataagtactgcacattttactctagaaaatttaaagcaaaggccacgcacgtgtgactcacgcctataatcccagcactttgggaggctgaggcaggtggatcacctgaggtcaggagttcgagaccagcctggccaacatggcgaagccccgtctctactaaaaatacaaaaattagccagatgtggtggtgcgcgcctgtggttccagctactcgggaggctgaagcaggagaatcgcttgcacccgggaggcaggggttgcagtgagccaagatcgcaccactgcactccagcttgggtgacacagcaagactgtgtctcaaaaaaaaaaaaaaaaa

SEQ ID NO: 58283 - DNA, 2297 bp, Homo Sapiens
aatgttcaggctttattccttcacgtatttttttctgccctccacctcctttgggagcaccccttaccgttggttaggctcctgcacctcacccacgccacactcggggtttgatccagtgatcttctctctctcagtgctccccgccacactcggcgttcgccccagtgatcttctctgtctgtgctccacgccacactcggtgttcgccccagtgatcttctctctcggtgctccccgccacactcggtgttcgccccagtgatcttctctctcggtgctccccgccacactcggtgttcgccccagtgatcttctctctcggtgctccccgccacactcggtgttcgccccagtgatcttctctgtctgtgctccacgccacactcggtgttcgccccagtgatcttctctctcggtgctccccgccacactcggtgttcgccccagtgatcttctctctcggtgctctccgccacactcggtgttcgccccagtgatcttctctctcggtgctccccgccacactcggtgttcgccccagtgatcttctttctctcggtgctccccgtcacactcggtgttcgccccagtgatcttctctctcggtgctccccgccacactcggtgttcgccccagtgatcttctctctcggtgctccccgccacactcggtgttcgccccagtgatctctctcggtgctccccgccacactcggtgttcgccccagtgatcttctttctctcggtgctccccgccacactcggtgtttgccctagtgatcttctctctcggtgctccccgcgacactcggtgtttgccccagtgatcttctctctcggtgctccccgccacactcggtgtttgccccagtgatcttctctctcggtgctccctgccacactcagtgtttttgctcatgtttgagttgttgacatgccgtttctctgagttcacagatcttctgaatgcctgttcttctgtgaatcccacccagtgtgattttcgtctcacacagcgtcatcttcatctctagaggttcattccagtgtcttttcctagcttccgtgtttttagtttttgaccgtggggaggaactgagttacacgatttcatgtctccatctactaattttgccttctgtgtcaattctgggtagcttttgattgacttttttttctcctatgtaatcatattttcttatttacatgcccaggaatttttttcaatatactttttatttttgaaaaattttaggtttacagcaaagttgtaggtcgggtgtggtggctcacgcctgtagtcccagcactgtaggaagccaaggtgggaggattgcttgagcccaggagtttgagaccagactgggcaacgtaaggagacctcatctctactaaaagtaaaaaaaaaaaaattagccagacgtagtggcgtgtatctgtcatcccagccactcagaaggctgaggtgggaggattgcctgagccctggaggctgtcgtaccactgcactccagcactgtaatgcattgctgtcctatttattttttgctcaaattgttccaccttccatgcctgagaatatttgatgggatgctggacattgtgaattttacctcattatgtgctggataattgtatattcctgtaagtcatcttgggctttgttctgggatccacatagttcctcggaacctttttgcccctttcagctgttgcttttaggatttgtgagacaggctggagcttggttcagttttgggttcatcattccccgggctgtggcagtgccttccagaaccttcttcccagggctgcggacagggatctggctgggcagtggcaccattccagacctgtgtgagcccgggacctgccggctcttctttgtgtggatgacgtcctgtccgctaaacctccaagggggtccccggctcatcgcagggctcctgctctatgcagcctccttcagccccatcttctcaggtgcaaatattttccagtgatccttattcccagtcagagacacacatgcagcattcaggcttttttgtcatctcgtgggcttttttgtgacgtgtgtgtgttcgacagcaccacagggaaacgcaaatcttgcttattttctattccgtgtcgattttcaagacattaaaaatcaacctcatggaggctgggcgtggtggctcacgcttataatcccagtactttgggaggccaaggcgggcagatcacgaggtcaggagttcaagaccagcctgaccaacagagcaagactccgtctcaaaaaaaaaaag

SEQ ID NO: 58284 - DNA, 4763 bp, Homo Sapiens; identical to SEQ ID NO: 24608

SEQ ID NO: 58285 - DNA, 2550 bp, Homo Sapiens
cattcattgaaggcccagatttagagtgagcggggcaaaccaagttttgtgctgggtggaaggaggggcggctgctgttcagcccacaggattcctgtgaggacaccacatgttcatagttgttaaaccatcttgcaaactcattgcctgatgttcagatctcccggctcagctggtgtctgtggaggacaggatttatgtttcagagagggcatgagcccagatgatgcctcaagactcaggttctaggagagaaagcagtgcttcagggactttgactgcccccgcccgaaatgcagtcgccatctgcaggtaaacagagctggagctggtgctgccggaaaagaaagaggagggctctccggcagcctgcggcttcctcaaggacttcccaggccaggcgctgtggctcacgcctgtaatcccagcactttgggaggccgaggcgggcagatcatgaggtcaggagatcgagaccatcctggctaacacagtgaagccccgtctctactaaaaatacaaaaattagccaggcgtagtggcgggcgcctgtggtcccagctactcgggaggctgaggcaggagaatggcgtgaacccaggaggcggagcttgcagtgagccgagatcgcgccactgcactccagcctgggtgacagagcgagactccgtctcaaaaaaaaaaaaaaaaagaacttccctgacagcacccaggtttccctgatccgcccgcattgtcagacttctaaggccaggctttagtccaagcctctttcttttttaaatttatggcactctcaaaaccacctggtgtgcgtcaagccctctgccactagaccctgtgtgaaaactgtaatggtaaaatgctcaaaccagggcaataagcacattttgacccttctgctttcattcacataaaactgatttctcagtctatattaatcttggatcacatttttttttttgagacaaggtctccctgggttgcacaagccagttttaaactcctgacctcaagcgatcctcctgccttggccttccaaagcactgtgtgagccactgagcctgacctcaaaattgtacattcaaaacaagctgacgtcctgggcacaggaggcacgtgcctgtagtcccagctactcaggaggctaaggcaggaggatggcttgaggccaggagtttgaggctgcaatatgctatgatcacacgtgtgaatagccactgtactccagcctgggcaataaagtgagaccctgtctctaaaaaaatttaaaaaaaaaaagctggcagaaacttagttatttgggattgatttgcatcaagtttagtgaattgttgggagattagcagtgtgttagtccagtgtggggaaaagaaagagagatcagattgttgctgtgtctgtgtagaaagaagtagacataggagactccattttgttttgtactaagaaaaattcttctgccttgagatgctgttaatctgtaaccttacccccaaccccgtgctctctgaaacatgtgctgtgtcaactcagggttaaatggattaagggctgtgcaagatgtgctttgttaaacagatgcttgaaggcagcatgctcgttaagagtcaccaccactccctaatctcaagtacccagggacaggccaggcacggtggctcacgcctgtaatcccagcactttgggaggccaaggcaggcagatcacgaggtcaggagatcaagaccatcctggcaaacacggtgaaaccccgtctctactaaaaatacaaaaaattagccgggcgaggtggcgcacgcctgtagtcccagctactcgggaggctgaggcaggagaatggcgtgaacctgggaggcggagcttgcagtgagcagagatcacgtcattgcactccagcctgggcgacagagcaaaactccctcccaaaaaaaaaaaaaaaaatgaatcaagtacccagggacacaaacactgcggaaggctgcagggacctctgcctaggaaagccaggtattgtccaaggtttctccccatgtgatagtctgaaatatggcctcgtgggaagggaaagacctgaccgtcccccagcccgacacccgtaaagggtctgtgctgaggaggattagtgtaagaagaaggaacgcctctttgcagttgagacaagaggaaggcatctgtctccttcccgtccctgggcaatggaatgtctcggtataaaacctgattgtatgttccatctacttagggggaaaccgccttagggctggagatgggacatgcgggcagcaatactgctctttaaggcattgagatgtttatgtgtatgcatatctaaaccacagcacttaattctttaccttgtctatgatgcagagacctttgttcaggtgtttgtctgctgacctctccacaattatcctatgaccctgccacgtccccctctccgagaaacacccaagaatgatcaataaatactaagggaactcagaggccggcgggatcctccatatgctgaacgctggtcccctgggcccccttatttctttctct

SEQ ID NO: 58286 - DNA, 397 bp, Homo Sapiens
  misc_feature (254)..(254): n is a, c, g, or t
  misc_feature (333)..(333): n is a, c, g, or t
  misc_feature (357)..(357): n is a, c, g, or t
  misc_feature (369)..(369): n is a, c, g, or t
gtttaaatgattcgtaattggtatctgagaatctcattccataggtcttttactcgtgtacagtgttgtcagattggggatatttgcttgatttttacccagattccttactaatatattttaaacaagtagggtaattattattattattttttttggtggggggtggttgagggggcggtaacttttgtcaagtatttgtttccttattgacaactcattgggttgttgtggaaattcaatttttaaattanttttttttaagccggagtcctcactcctggtcaactccaggctggtgtgcagtggtgcaatctcatctcacctggtaancctccacatccccagcttcaaaangattcctggtgncctccttctcccggggtcaagcacctta

SEQ ID NO: 58287 - DNA, 2944 bp, Homo Sapiens
gtggagataaagatctgggagatctacagatacggatcatctgcatttggaaattttgtttgcccttctcacacatttccatccaagttttctttggggaagaggggatccctgcagaggagtccagttgcaaatgtgaaatcttaaaaatgtatgtaaatagcatctttcattccgtgatacttgtttgtttgaatagaacattgttaaattttattgtgcttcagaatcatctgggtgcttacaaacatagattgctggactctggttctggagattcggattctggaagtctgaagtggggcttgggaatctccatttcttccaagttgccaggtgatgctgatgctggtagtcgggagtccgtactttgagaaccactcttctacctaccaagacttccaaaaaattggtactctgggaagatgccctgtgccagtcctgtggcttcttaggcacctcttccagcatagactcctgcagagaacctggtacctgcaagtacctagtacctgcaagtacctgcaagtccagtgtgggaaatctcatgacaggcatcaacattccgtgacggttgacagccacctatggggtggctgatgccttttctgtgtcttcagggttttaggggaaggagagtctaaatgagtggttctaggttgtgggaagagcctggctttgatgttcagacacctggcctcaggctgcatcgcccatacttcctgtggaatggttatcatgagtcctgttgtcctgtaggtgaatcattgattcctgtctttgcataacctctcacttgatgataatttttttttaaaaaaatgactcttggaaacagaacacacagtttgtagagggacctacagtacagcagaagctttgtggaaggatacaaaatgtgagggactgtagtcgaagagatttaaattggaagtgggaagagattgactttttttttttttttttttttaaagacagagtcttgccctgtggtccaggctagagtgcagtggcacaatcttggctcactgcaacctccgcctcccaggttccagcggttctcctgcctcagcctcccgagtagctgggattacatgcatgagccaccaggcccagctaatttttctatttttagtagatatggggtttcaccatgttggccaggctggtctcgcaaactcctgacttcaggtgatctgctttgtgtctcttagggagcatgtttgaagagtcaaaggaaaaccaagtctgttagctttgcgaaacgtttttttttttgagatggagtctcgctctgtcccccaggctggagtgccgtggcgcaatctcggctcactgcaagctctgcctcgtgggttcacgctgttctcctgactcagcctcctgagtggctggaagtacgggcgcccgccaccacgcctggcaagtttttctggaatttttagtagagacggggtttcgccatgttggccaggatggtctctatctcctgaccttgtgatctgccctacttggcctccaaaatgctgggattacaggcgtgagtcaccgcacccggcccgaaatattgttaaaaccaagtacctttgtgaaacattgttacaaaaaccaagtaccaagtgtgtggcattaaagtcaaacattaatttcaagttacagaaagaaatagcactgagtagaggttgatcgataaaaaatgaataaaatattcaacagaaactccttaaaaataatgtgagaaatggacatgtgacatgggcgtttaaaaagtctgtaaggccaagaaaagtttcctgaaaggaacactgtgcccaggcagtcctggctttgcaggattccctgataaccgagctcaggcatcctgcagagtgagtactgcccagatagaaccttctgcctctttggggtaaaattcgatttcaaagagagagaactgtggggtgagaaaggaagactgggacccaaggggccaaactagtgacaatgactgctgtcatgaagggtgacaaggacaatacctgctgagctcaaaccaccctttggacccagtgaagctcagatgttgcttccagtgcaggagtagttaagctcaactgttttacaatatccagttatttggctgggtgtgatggctcacacccacactcctagcactttgggaggccaaggtgggtggattgcctgagctcaggagttcgagaccagcctgggcagcatggcgaaaccccatctctactaaaaatacaaaaaattagccagacgtgatggcaggcgcctgtaatcccagctacttgggaggctgaggcacgagaatcgcttgaacccagggaggcggaggttgtagtgatccaagatcatgccgttgcactccagcctgagtgacaagagtgagacttcgtctctaaataaataaataagtagcaaaaacaatccagttattcctcaaatatttatgagcacctcttaatgtttcagatactattgtgacaagagaaaaatgtgtttgtatatgtaaatagaaaaacaaaagtgatgtggaagcgattacttctgtcattttggaactaccttcctcccatattaagtccatattatgacaattcaaaaataatcaaacttcgtaagatattacctgtgaaaggaataagtatttaaaaatgtattttagatggccttttagaaatctagtccgtggacacaatctagcatcatgcagttgccttcaaaaagaatatcctaaagttcttgtttgttttctttttcctttcaaagtgttctgttgaaaataacccatttgtcattttagttttgatatgacttagttatacatgccttttgaagcagtacccacccacatagtaattgcgactatcttgtgttttgaaaaaaaaaaagcgagacaatttgactttgatagttttaagttcaaaaaaaaaaaaaaaaa

SEQ ID NO: 58288 - DNA, 2472 bp, Homo Sapiens
tatattcctggggtgtacagcatagtcagaaaagtagcatatgagacctaacactttctcctaaaatggaatgtacagatacagacagaaaagcctaaaaccaaaaagcttttgtcgtctgtctctggatacagaaatgttagaggggtaaatgaactaatttctttttttatcatgctatgatttattagtctgttatacatgatccatcttgtgaatgatggcattctgtctccaggaacatgggccaatatttgcagggtaaagaacatgcatgggagcaggctggtgaccctctagaaagcaagaagagagaagtagactctgagggcaaaaaggtcgagacaggcatttctgaagccaaatggtgttgaaataacataccgcaggcctttttccttgtcagcgtaatccaattgagaatgcccaactgcccctgataagagtcactcaggagtgaagagctttgctaccagggaaagcagcttatgtgtgcattttggctcaggaatgtgccagcccaatgctggccaaatgagaaaaggctgctgcggcctggagaacacagcctcctgggaggatggtggctgttcccttgtagcttaggagagtattctgttttgtccaagggcagtgcttgaggccacatgttgaggcctttgacatagattatcagagatggtagcagctctgacatgagaagagaaaataatgtcaagattcagctgggcgcagtggttcatccctgtaatcccagcactttgggaggccgaggcgggcacatcacgaggtcaggagatcgagaccatcctagctaataacggtgaaaccccgtctctactgaaaatacaaaaaattagccaggcgtggtggcttgcgcctgtagtcccagctactcgggaggctgtggcaggagaattgcttgaaccggagaggcggaggttacagtgagccaaaattgcaccattgcactccaggctgggtgacagagcgagacttcgtctcaaaaaaaaaaaaaaaaagtcaagattcatccccattttggagaggtcacctcatcatttgggaagacaagaggtgtgggacatctgcagattctcagacagacattgggcctaattgacacttctgttttaatgtcataatatggggagtgaagcaccctgcccagtcgtattgagtacagtatgagcagaccaccaccaagacatctccaaagggcttcactttgctttgggttgaagtgactcatgagcctctccagaaataatttaataattcttgttgtaatttgtcactgactgtccagaaattggatccggatttgattctggaaggatccgaagtgttttctccaatggggggttagatttcccctccttgtgccctttttcccccagatgactggctcatcttagaacatggaccagtcaccttcagagcacctctctacctaatctgcactctgtgtttactggactgtttgtgccttgaggttgacagtcttccagggcgggaattttggctgcttggctggggtgtcagatgtctccttggttgtgaaattattcagcctgcttactatgagcagaatcatggcacttttctcctgaaggactcaggcagttttcactcttctggagaagatccagacaattgaatctcagttcccagccaggctgaaccgtgagataggacaccagaaacctttctgttctagccttgtaggaagcagtaaagtcggatggctacgagcagagcttttggagttggatggacctggatttgattcctgtttccactactagctagtgctatgatcttagctggtggggacatctcgttatcctttccaagcctcatttttatcttcaaaatggggttaattatgaagagtgaaggtatgtaaagtgcatagcacttggcatggcgcaggtaataaatgttaatgagtactttaataattcattttattaaaaggaagcctgttctttctctgataccttggagaaagctgaagccctcagaaattaaaagtgctatcccaaattgtaccgtaaatatcaaccacccgttatctcagtatttatccttaacttgtgtttgttttatggtttaggagtcaaaggtagaatttttatatatatatttacttaaatcttaagaaatgaactggtggccaggtgcagtggctcatgcctgtaatcccagcactttgggaggccgaggcaggcagatcacaaggtcaggagatcaaaaccatcttggccaacatggtgaaatcccatctctactagaaaatacaaaaattagctgggtgtggtggcatgtgcctgtagtcccagctactcgggaggctgagccaggagaattacttgaaccggggaggtggaggttgcagtgagccaagatcactccactgcactctagcctggtgacagagcgagactttgtcccaaaaaaaaaaaaaag

SEQ ID NO: 58289 - DNA, 2493 bp, Homo Sapiens
ttttctgcctgaaacctctggctggtggtgcctttacctgtgttttgctcgggcccactgggttcgttctgtccactcggctcatgctagtggtttggatcccacacttgccaagggtgagctgggtacagagcagtgaagggtgtgtgagcaagcaagcatgggatctggccactgcacacagtcaagcatgccagctgcagtggggtgggcagctccaggcaccggcacaggtgccagctccctgtgaggctgcagctggacaaggccgactgcaaacagcttccactgtgggtatcagggaatgcagtggcgcccagaaacttggagatgcaggaactgcagaaccccaaagaaggcatcatagccctggcttggggagctcctaggtctgggctccctgaagggccacagctcttgtctcctctcttctcttcttcttgcctgcaatttggcaagcaaggggtgcgtttcagccctgtttatgttacacctctttcagccctgctagttggcaggtcccgagttcttgtcctgagtccaggaagaatgaggtatgtgggcaagtagaaggtgagcaaggtgaagaggtgctttattgagcaactgttcagctcagaggagacctgcagtcggtagctcctttctgcaggcaagtcatcccaacgtctgttcagctctcagcagctgagagagatgcactgtggttagctgtgcccacattgccgaggctgttcgagctgaggagtgccttcaggccagtgctgagccacacttagacccacctcaacctccctcttgtgctcgtcagtgcccaaagtctggagggggctgaggtggcagggggctggcatgtcagcactgccttgagcttgcacaaaccaggccgggttccgactgtgcctgggttcagcctcaacttggatccgaggttggagtgggctctgggagtggagagacgccaggtggtgggaccaggtacaactgagcctgtgggggcaggggggcttgctgggcctctgagagtgcaaagatgcccaggtttgcagtcatggctggatggctgcagctgtgcctgggagggcggggctcctgcctgccaatttagaaggggtggggctcccaccctttcctggctcccaccagcttcgaggagcgcacagccccagccactcctcctcactgcagccagtgtctccgtagcaactgctccacatgggccactgctgccatcacagagcagtccttgcaggtgcctttcttgtacttcagcactcctgggggtcattagaagccctagcaacactgctcaccacactatagctccggaggccctagcagtcctgctcccacagatcccacttctgacaccatctgttaaaagaaaatcttcagctgaattaaatttaaaggaacttaattgagaaatgaatgattcacgaatcaggcagcccccagaatcacagcagatttggtgagactccagcacagctacatagtggaagatttatagacaataaagggaacgtgatgtacagaaatctgagtgaggagtgaggtccagaagcaactgggtcccttaccgttctcagcaatgtggtccagaaacaactggactggttacagtgctcagcttttgccttatttgaacacagctgaacactcagcagtgtgtgagtggcagaagtttggctgttgggattggccaggactcagctatagttacaggtgcatactcctaagttaggttttcagtctttctacctattaagttaggtttcagtttgtccacagggactcaagtctagaagtacagagtccttcccaggccatatttagttcactgtaacagttcctattatgacctcactgacagttctttttctctgaattctcctttcttctcaacagcttatccaaatgttccactggtccctgttcatcccgccctgcagttctccttgactgattcagccctttgtggtttgccgtcctgtttctctacagcttggacctcttcagtctttccatcataggtttaactctctgttgaatgcttctttgtagctatgcaaaagttaccttaagctcaaaaaattcaaagtgaaagccacatcctcctctcttcctttatgtgtatggtattactaccatgcagccagtgacccaaaatgggatttcttctgggcttttcttgcttagattcaggctcatctggtgtcaagccttgttacttttgtttccttgttcttttatttttaattttttttcttttgagacagagtttcactcttgttgaccagcctgggcaacacggtgaaaccccgtctctactaaaatacaaaatattaactggacgtggcagcgtgtgcctgtaatcccagctagtcaggaagctgaggcaggagaattgctagaacctggcaggaggaggttgcagtgagccgagatcacgccactgcactccagcctgggcaacagcgactctgtctc

SEQ ID NO: 58290 - DNA, 2292 bp, Homo Sapiens
gaaatgaggctgggcgcggtggctcacacctgtaatcccagcactttgggaggccgaggagggtgtatcacgaggtcaagagttcaagaccagcctggccaagatggtgaaaccccgtctctactaaaaatacaaaaattagccaggtgttctggcaggcgcctgtagtcccagctactcgggaggctgaggcaggagaattgcttgaattgcttgaattgctccctcctgggagacgaggttgcagtgagctgagcttgcgccactgcactccaacctgggcgacagagcaagactctgtctcaaaaaaaaaagaaaaaacaatgaagtgaataaaaagtcaaaagatgaataggtccattcacaaaagctgaaatacaaatgactggtaagcatttaaaaaatgttcagcattggcctggtgtggtggctcatgcctgtaatcccagcactttgggagacagaggtgggaggatctcttgagttcaggatttcaagaccagcctggggaacatagtgacactccatctctacaaaaaaataaaaataagttaaataaattagctgggtgtgctggtgtgcacctttagttccagccacttgtgaggccaaggttgggaccaaataaatttaaaaatcaacaacaagagatttttatttggtggaaactgagaataaaaaattataatatctggcactgtccagggtagaaggaaatatctaacttaataatgactataaaagttgacatggtctttctggaatataaactagtaatatgtgttaaaaaaagaaaacaactaaaaattttctcttctttgatctagtaattccatttctaggagtttgtcatgaagaaataattctaaaagtacacaaaaattatgcaaaattatgtataaagatatttattataataaaaaattgaaagtcacctatattctcaaatgtaggagatatggaatgttatggagcgttatggactactgtgtaaccattaaaaattatattccaaaagtattttgagataaggggaaatctctatgtgttgctaggcaaagtaaaccgggtaaggcagtatttatgatataattttaattttattagagaaaatatatatggacatatgcacagaacatatgaatgattatccttgggtagggagatctaggtgacatttttactttttatattagaaagtttctatgtaatgtgtattgcattgataatacagaataataaattttattttaataaagaaccatgttggctaagggggagaaataaagtgtggtaacacactgggaacactggaaacccaccaaggggttgcaagtccaggtgcagaataagagagagaaacagagaagcagagaaagaacatttttaggtttgtaatcttggaggtgcaacatctctgtttgatgaattttctgctgataaagtagagatggataacattggaaatgagacaggcaagatattagacaggcctttgtcatacatattggagttttcaaaagtaggggcaagccatgggatggagaactttctagcatgtacataagtcataggggaaagagggagtggcttaaaagtcaacattcttctctcaacaactgtgaagaggaaagaaagcaaatgctgtgagcttcatgagaaaagtggctggaaagtcttaggtaggggctgggagcaggcaataagggaagaaagggaagagagaacagtctagtttcttgtccttaattccagaggtactggtaaggaggaaaaatgaataattttagtagaagagtatattagttagctagggctgccataacaaaataccatagcctgggtggcttaaacaacagacatttattttctcacagttctggaggctggaaagtccaagagccaggtgcagcagggttattgttgggtgagggctctctcctggtttgcagacagccaccttctccctgtccctgcataacatttcctctgacttcatttaaccttaattacctcctaaaagccctatctccaaataggtatcatatggaggctggggtttcaacacacaaaatttgggaggacttaattcagttcagagcagagtttttagcttaacaatattttaggacaaacataagtttaaaaaaaaatcaaggatatggaattatgtgtatggaaaagttcaaaggtttatgggtttttttttcccccataacacagccagtgaggatgagggcaacgagacaagttaatttaggttgtggtgagattaaaaaaaaaaaaaaaaaa

SEQ ID NO: 58291 - DNA, 2270 bp, Homo Sapiens
ttaggtcatctgtttttgacagcaattataaaacttgattaaattgaaaaaaattgtttacttatgtagattgtatttataatggaagaaatatttcagctaacaaaggtaaggcattagtcaatacttttagtttgtttggggtcagcagatttttattgaataccttaagtaatcataggattagacttggtagatacaaaggaattttaaggtagacaaggaatttacatttttgtttgaagaactggcttatatttttaaaacaaattggactagcaaatctaaaaggtcatgtctttaactttaaaatttcttgggcctatgctaccagctcagctagttaaagggtttgtattgaagataagtagagtgggaacagcagtgagtggctgtgtatgccatggttggagtctcagaattctagaactacagttttttaaaattgaataatgtgatgaaagtagtattttggggagtaattctggtgtctttttagtggataaattaaagtaaggataaagggaagccagaaaatatttaggtggtgaaaaaaatctagactatttttccgattgtaaaacttggaaagtaactaatgtaagagacatttgagaaaaatataggacttggtgaccagatgtacatgactttaagatcttgaactccaatcattaggagagtagtgtctagtatatacagctacagtaggaacatgcggctgcttaaacaccattgctgatgccccattgcctatgggagaaggtatggactccttgcatggcactcaaggatcttcaccatcttgcttgcctttccatctcatcgtatagcctccctctgccattaccttgctcaaatcacaaaagaatgtttcataagtatgctatacatttttaaacttctagaacattacttattgctgttactaaagcaaccttcctacccttctgttgaattaataatcactgcttgctaagtaacatttacctttgctaagataaatgtgacttcctccatgaagatttgtctgatagtccatcttccttacatcctaatccctttttttttctgttgttccataaggctgtacttttgtgactttctctaacagttgccatgttcattacatttgtttctttaatgtatctgaatgggggctccacgaagcagaaattgttccttatttatccccggtttctagaaagtgcctcatatatactagtcacctaataaatatttgtagaacaattaagttgtggggtggtgtctttggcagaaatagaacgtattaaaggggagccaagtttcagggaaagtgagaattttaattttgaacatcaaagggacaataaaaaattaatatttcagatgaatgtgtcagactaggtttcatttttaaaacattggagtgaataataaaagataagcataagttataaatgtctctgcttttgttcttttccattttttgctgaaatccttaaaaagatgctatctcattttatacccttttttttaaaaaaaagggaaattcaagttaattgaatcttgcatattacatatacaaatatcttcctgtctagtaatttctttattcacagagcatatagcaataatttgacatcatactttgatgtctgaaaacctatgcaggatgacatggagtaagaggggtataattgtagaaccaaggcagggaaaaaagtgatgagcacacccagagtttgtcttcatatgagccataggttaaaatcaagcctacattttagatgaatgattattgtatgtatgctgatggaaaataagaatttatcattttaaaatatttaatcttttcatataattaggtgataattattgtagaggcagtgtagtagacatttgattaatttattaatttatgctaatgcagaatttttgccagttatgtaagtacaccaccatttgacctgtattcccccttgtgtccctgctccactcttgtgttcctaaccctgatcctgaccctaggtcaaccagattctctttctcaggaatgttaaatctgtatagcgagacttagcagggtaaatggtgacaggagctgtatagtccaacagtactacccttgaaaaactgtctgtgaattactacttctgaatttttttatcagttaagattctttgtttgggaacaacaaaatccagttctgatttaaaataaggaaaaccaaagcaaactatgacaaaaaaaaaaaaaaaaaaaaaaaaaaaaaaaaaaaaaaaaaa

SEQ ID NO: 58292 - DNA, 446 bp, Homo Sapiens
gtagagaaagggtctatgttgtccaggctggtctcaaactcctgggctcaagtgatccccccaccttgacctcccaaaagtgctgacattacaggtgtgagccaccacacccagccaaaaacccagttcttaaacactttgattaaatgcttttgcttctgtgtctgtagccaaatgctccacaggaaccaagggaaattgcccatatgggctgagggaaacttttcctcactagtttcactactgctggtcccacttcctacattctgatccttcctttctaagcatttaaacacattactttcttcttaaattcttgcacccaaaatataaaatcctgcttagctacaagcaacttagatttaaccttctatctttctttacatgactcctcaaaattcatttctcaatcctcctgtatttctgtgtgtgttggggcggggaat

SEQ ID NO: 58293 - DNA, 1084 bp, Homo Sapiens
ccgggagtgcccgttgtctgcctggagacatgcctgtgggagaagaggctgcccccacctgctaccatcatcccagcatgggtgcggtggggggcaggggagacagagtaaaaatcgcagaggacatggggcagaaagatggaaggaacctgggccctcgatggctctgagtgagtcagtcctgcagtgccccgtccccatttttctgtggcctgggaaagtcaaatttcctcatcctttgtagttggccattgtgttatttggagatggaagagcattctgaaacaagccactataatgaaaatccaggtcgtagcaacttgccgtgcacggctttggcttggcatggacttacagtgacatctttgagatgcacttgtccggggtgcaggtatatttgagagtgtgaggaggacatatgtcctctaagctctgttttctaaaggcagcagaattccatttgccaagccagatgtccctcaatacgttagatcccaccaataaaacattaagcaattacaatggttaatattcactaaagtataattagaagctggcgtaaattgtgaatgaaattggcgggttccatacgttacagtgaaataccaaatctttttttagttgtgtatgtgtatctcagtgagtctgtcaactcagatgagtgaatcttacctcctctgtggatagaaacgagctcaatttcaactcagttcactataattttaaatgtttaagaacatcttgccagttgttctatcatgttaaagttactgaaatctggctgggtggagtggctcatgcctgtaatcccaggactttgggaggctgaggcgggtggattgcttgagcccaggagttcaagaccagcctgggcaacatggtgagaccctctctacaaaaaaaatccaaaagtagctgggcatcatggtgacgcacacctgtgttcccagctactcaggaggctgaggtgggaggatcacttgaagccgggaggtcgaaggtgcagggagccatgatcgtgacactgcattccagcctgggtgacagaacgagaccctgtcaaaaagaaaaaaaaaaaaaaaaa

SEQ ID NO: 58294 - DNA, 705 bp, Homo Sapiens
gataattttctgttaagtgtttttgttttttataattttccaattagtcttgctcattttttatataaactttgaaatcaatttttctgattttcaaaagaaaaaaaatcctgtttagtattcttagtggaatgaattaaatttccatagcaatttagggaaatttgactttcttaacgtgttgagtgttaaacccacaggtggtagcatgacattgactcctcagccaagcatattatcaactgtcggaaactaggttttcccatagtgatccaagaaactagtacgaaatgcctttctgattttttaaaacttgtatacatatatagtacatattatatatacttatatattaagtaatcagaagtatgtgtttctcaatcaccttttaaagacttctttatatagctcttgtacatttcttgatatgaatatgttaatgttttctttcattatgttgcatatggcttttgttttctgcatgaaaactattgatttctgcattctaattttgttcccagtcacctaactgaattcttctaacagttgtaataaatttctggttggctctcttgtgaaaaaaaaaaaaaaaaaaaaaaaaaaaaaaaaaaaaaaaaaaaaaaaaaaaaaaaaaaaaaaaaaaaaaaaaaaaaaaaaaaaaaaaaaaaaaaaaaaaaaaaaaaaaaaaaaaaaaaaaaaaaaaaa

SEQ ID NO: 58295 - DNA, 358 bp, Homo Sapiens
  misc_feature (69)..(69): n is a, c, g, or t
  misc_feature (264)..(264): n is a, c, g, or t
  misc_feature (328)..(328): n is a, c, g, or t
gaggtttaccctggattaaaccatttgagtacttcactgaagcacagctctattcccaatggttattcncttgtaactgaaaactagttttcttacatcctgcccttgatcttacccaaaataacttctgttctgtaccagttcccctctactcatacttcctcatattcgtggagtacaaaagagcaatttctgtggactcttattctctcacacacatacagagtggtaagagagtaaacctcagtcatttttccctttctngtccacaagttgtgctggagtgggagccatgattaaaagaggcttaaagtgttttataaataancctattaaacaaattattaattcaatcaat

SEQ ID NO: 58296 - DNA, 6327 bp, Homo Sapiens
agagtatcctttctaaactattctattttccgtctgagaaatctccctgaaatcttcctgatttagatgtctgctgaaccaagactcctcctactaattagggagagccaactgagacccccaaaggggctgaaccaagacagacaccctgcagtggagctacagacacctccacacaaggctacaggaaaaccaagacccctgatggagccaaaccaagacagacaccatgcagtggggctacagacggatactccaccatggggctacagaaaaaccaacacccctgaaggatccaaactgatcaggagaaggaaggaggtgtgggcagtacctaggatactcaccaaaccagatacctcattgtggagctacagctataagcactccatgaccaggctacagacatataccctgccatggagctacagacagacaccctgtggtagggctacagctatgggacgtctccccagggctgtttctctattgcagttaaattcatgcacattggattggcagcaccctgccagtagagagattgccagaatcagcccccagtccaagacaactgtggccgcttgggctggcctttggatccatcaccagagaggggcctactgaaccacaggcaggcagccacaagggcagtcccagacgagcctccaaatttgtaactgcccaacaggttcaccctgcccgctgcctaggcagagccaatttatcaagatgggtgaattccagtagagaaagagtaattaacacagagccagttttgcaggagattggagttttataattactcaaatctgtctccttggtttccatttttacaaaatgcctttttccatccccttttagcctatgtgtgtttataaagttaaaatgagtcttttgttggcagcatatagttgggtcttgttttattattgattcacccactttgtctttttattgaagaacttagtttcatttgcaatttaaagtaattattgatagataagaacttagtattgccattttttaaaatttttttcctgctgctttgtaggtcctttgattctttcttcctcttttgtgtttttcattgtaactttatttttttatagtggcatactttgatttctttctatttgttgtttctctttgtttctattagaggtgtgtgtgtgtgtttggttttcataagacatatcaaacattttatagttttaacagtcttttttaaactgataacatcttaaattccctcacatacaaaaactctgcacttttattccccccaccccaacagtttgttatcgatgtcacaatgtacaactttttatcttaatatacttaacaaattattatggctatagtcactttaatagttgtctttaagcctttgtaccagagttaaaaatgatttgtgtatcatcgttatagtgtaatattctgacactgactatctacttacctttaccagttagttttataccttcatgttttcaggttattaattagaatagttttgtttcaggttaaagaaccccctttagcatttcttgtaaggcaggtttactgtttttgaactcccttagcttttgtttgggaaagtttttaatctctctttcatttctgaaaaacatttttgctagttatagtattcttggttcacatggtttttttcagccctttgaatatattatccctttcttctggtccgtaacatttttagggagaagcttgtggataggctaattggtgtttctttgtctctgatgagtcagttttctaatgctcctttcaaagtcttactttgtctttaacttctggtaatttgattagcacatgccttagtgtaattttctttggattggtcttgattttttgagcttcatgaacatggaagtccatatctctctcaagatttggatagttttaaggcattatttatctaaagaagccttttgcttctttctttttgtcttctttttctgggacttctatcatgcatattttggtttggttcattttgtcccataaatcctttttgtcttctttttctgagacttctatcatgcatattttggtttggttcattttgtctcataaatcctgcaggctttcctcactctttttcattctttttttttctttttctcctctgactggaaatcaaatgacctgtttttgagtttgtagattctttcctttctttatcaagtctgatattgaagttggccgttacatttttatttcatttatggtgttcttcagctccagaatttcgtgtgtgtgtgtgtgtgtgtgtgtgtgtgtgtgcgcattttttgtctttgttgattgtattttgttgatatattgtttttctggttgcatcgagttgtctgtgacctcttgtagcttgttaaacaattattatgagttctttgtcaggcaattcatagatctccatttctttggtgttagttactagaaatttactttgtttctttggtggtatcatatttctttgtttttttttttttaattttccttgaagccttgccttgccatcttcacattcaaagaagatgttatcttctttgctctgtagtgactggcttcaggagaaaagacttcaccagtcagctgaggtggggattctggaggtctttcagaccttttctgtggatataactactctacttcttccctttttcagggaagaaatcttaggtttacattccttctctcaatcctgcaaaggtaggtccattgttgagagcctcctttaattttctctatggtagtgtcctgaaatgttcagaatcaaaccaagtctgtggatgcttgtatgtattgtctgcaggggcacatatagggtgccatgtacaggagagaggggtgcatggtatgttaggggaacatatagcctagttggcagatgggaccataggtgagatgttcttgggaatacctcttggtggagtgtgggaggcatttagcagaaaccatggtgctttgttgcgttctgtgccctagttgttttgagtccccacccttttctcctgtttctagcttctcctccgagtcttctgtgtgttgtcggtggggtgagaaagaagtaggcctcttaggcagtgactctcagagctgtagaagacaggaactcactatgcttttactttcctttgtgagacagatccaaggctgattggatctctcttggcactgggctgtgcggctttaggggagggatgaagaaatagctaaagtgaaattgttcttacccttttcaatgcatctatttatttaagctttttttctactggggtgttggccatatctgctggacttttgggctcccacaaagctactgtcgtctgtgggtggttgacaatattgtttctgcaggaagacgatggctgaaatttcctatttctacatcttgatgccaaatttttgaggatttcctttctaataagctttttttaaagaatgtgttttggaatattttaaattttgttaattttgtttcgtggtctctgcctgaatagacaggcacttgcctggaaagtaatactgtttcactgcctcgtttttacctgtttaatctagaaccaaattgtgtcaatgtgtcagcccgtttgtgcttttataacaaaatactacagacagtaatttataaagaatagatatttatttcttcacagttctcaaggccgggaaatccacgcttaaaggttgcagaaagtttgttgtctggtgatggcttgttctctgttgtcaagtgcttgttgctacatcctctggaggagagaatgctgtgttctcaaatggcgaaagtgacggacagggtgaactcatttcctcaagctccattttaaggttgctaattccattcatcagggttgtattctcatgacttaatcatctactgaaggcctcacctctgaatactatcacattgttgataaaattttaacacatgaattttaggggccttttagaccatagcaatgagaatagtaggttctagagaaagtcatagtgactgaatagtgtaaatgtgttgcatttatttctttattcatcctttatatacatgtccaattttctcttaatttctattgttgctgcctgtagtggtgtcagaaaaaaaatgaatgattagcactataatttggaaagcaaattgttttgtactttataagagaatattttcccttaagttttatgagaaaaagtaatgactcattgcaaggtgataaaaaagtgcattattattgttacaaatgtactattgaggtgccttttgacattatcagaaaagtaatatttttaaaagacaccgcttgtatgagattttgtgaatatttattccagaccttgagcagttctgttattttgtacttgcataattactttattctaagtctcgtaaggcttttttaaagtattgttatgataacaatattgttaatgccttgtgtaatggacagcaaggaatttagatttaaatagctgattcctgataaagtaatagagataagtaagaccttttggctcatttcattacttttttttttttttttttttttacagaactttgacttataaggctaatcaaattgagtagttaaaaatacatatttctagggaaaatattttattttgttatatactaaatcttatatatcaatcaaagcaaaatcttgattcacctgtattgtttattaatgtgtaggtagttttgattttaaatctttgtttgtaaactatacctaaaacttgatgataaactagctgacatgtagaaaaatacaattatcttgttttaggaaacctctagcatctatttagccaaatatttttaaagtatggagagatttgtttatgaaggtctcctttgtgttgagtcagtgtggcatggtttatttgtatttattagatgttagggcattttatggctcctggttcagtttacctttgaaatagttcgctggttgtggctcctggttcagtttacttttgaatagtcacttagttaaagtaactaagcaatggcaggttgaaataaaaataacatttatttatttaggtatgttcttctgatgttagcatacttctttttttcccccgctctgagactctatatggctgttttatttgggacattttgctcaactgtgtaatacaaggttcattaagtctagaaacaggtaatatgtgattaaaatcagtacgtgtgattaaaagcagtacgtgtgattaaaatcagtatgtgtgattaaaatccgtttgttctctgagacaaaaacttgaatcctcttcttatcctcatggaactttcttttaaacctttttaaaaaatggactattttctttggaacatgactcatcaaatataccatgtgctttgattttcttactctatgccatattattacacctagcagcagttgattttttttaaaaaagcttgtggagttcagtgatattcctttttatttggggaagaaatgtataagactgtcatagttggctgttgaaagtactaaattgtgggtttaaatctgttttcattaaagtatttctatgttatgtatcttaagtttgtgtgcaagtgatatcttgcattctctgcacatgtttagccctctggtcttacatcaggagttgtcattttagtgctgatacagactaaatcctattacttcattgttgataatattttcttactatttaaatgtttacaataacttgaaggtgatattattgtactccttaaaaaccaaatataggcaggacactgtggcttatgtctctaatcccagctttttgggaggctaagatgtgaggattgcttgaagccaggagcttcagactagcctgggcaacatagcaagaccttgtctgtagaaaaaaaaaaaatttagctcggcatggtggtgcatacctgtatagtcccagctactcagaaagccaaggtaggatatattttatatattttatatattttatggcttcgatggttccttttttcttttttttctcagctggccataacctatgctgtttaaaaatgtgattgtgtgggattcctttttatttttttttatgcttcatgagtctaagaaggcttgtcagtgatacccactccccgttaccaccacccaaaaatcatatgatattaatacagatataatctgtatgtatttgggccagggacggtggctcatgcctataatcccagcactttaaggaggccgaggtgggtggatcacctgaggtcgggagttgaagaccagcctggccaacatggtgaaaccccgtctctactaaaaaaaaaaaaaaaaa

SEQ ID NO: 58297 - DNA, 5251 bp, Homo Sapiens
atttaaatttatactgaataatctcattcataaaccacagcacaacattctgaagcctgcccctccaagaatctatagctctctgccactctgatgacttttcatctgtctctcttctacctcaaaaatctctcatctctctcatcttctgcaaaactttccctcctgctcagcctactctgggctttcagtgcctcgctgtatctattctatgccgctcattagctttgctctttccgatgtcaatccagaccgccacaattctcccactaacctcctcaccccttccccaatctgcatcacaaaagtgcactagcccatctggccaaaggcagctctcctccaccaggtggcttgggggtgggggcctgagatgctcaaaggctaatgctttattctgtgatggttgttatctgagaatttttcattcaccgaaattcacttaagaccaaatccaattaaatgaattaagtcagatgcgcataaagatcattaagatatatttcttccttaagacatgcatccatgcgtgtatgtctatgcgttctctctctctctctcacctttggccaaattgttaaatgttcagaaggcagtcacacaaatgaagaagagtttttggaatgatcatataatttcctaatcctaacagccatcctgtaaatccataaccgtcagtctcgatggcagtgaagaagtaactacagatgagtcagcagacatttattcctagccctggaaaaacaactcatgttttaggtcctcctgatgatggtggagtttcattgatttcatatacaaaggagggcatgtgagatactatattagtatcttttcatatttgctgttattgcaatatagtttaccctgaaaaagaacatcactgtttgtggaaatgatgcattttgtgaagtgctgtagtcctgcaggttttgtaatggatatcagtatacaaagagaacttttcattttatcagaaatttacttcactacccatttgtgggaaacactaataagagcatgggctctgaatcagaccactgggttcaaggcctggcccagtcccaccactctgtagatgtacagctagataactgtgccttagttccttttctttatgatggagacattaatggttccacttcataaagctgttgtcagcattaaatgggttatatgtgaaactttcagaactagatccagaacattgaaagggctctgtaaatggtagctctcatttatcctcctcctcctcctcttctgcctcctctccttcttcctcctacccctcttcttcctcctccccttcctcctcctcctcttcccctttctgctcctgttcactttagtgaaggaaaatatccttgattttattgcttggccttaatgctaagaatatatgtctaagttctagcagaatatcagcaggccttaaaatgaagttactttaagacaagttgtaaagacattgcattaattaccatatattggagaaaaacttcagttttctccttttagatgcagtggtggtcaaatcatcattttaacgcaagatttcacagcatttcctttggatatcacatgaattcctaacttaagtagcacagggctggtattctcccactgataaaggccccagagaggtgacaagagaggatatggtagtttttctgatgttatccatgaaggctagatgtacttctaacttttgctcatctctctgtgatttacaaaggattatgatttggaaatgtgtccacattctttctgatatactttattcctacatcatctcctgaaaaaattacttcttgtgctttgtggtaggaaaaaaaaaaaaaactgacttggtagttaagagcctgtctctagactcagaccaaccaggatttgagcccagcactaccctgtgactaaccaaccaaggacaaatctctctgcaactgtaaaagagagtcatgatactggcctcatagggtagacatgaggattaagtcaaagcaggggagaggatagctgactaggacagccttttatcctgagtggttaccaaggataacaggaatcctgctaggagtaattgagaggatttagctgacctgcgacttcaagagtcccagcagttcttcagtgggtggaaaatgagcagtaggagagtcagagaaggactcttgggaaattagataaatgtctctcagaacaaccatgcgtgtcttccctttctggaagtggctctgaatccttggccacttattctgttccttgattgggaatgattactgtacagcacaggtgttaagccccctcctgctatagagagccttggtttgcagtgcaccttcctaaaagagtccaggctggatttggatctggttgtgtcttttgtcggagcttgtcagaagatgaatgttccagggcccttaatgactggataatagttccttggtcactgaataatgaaccccagatgaatgaaggaaatgtgttgtctggcctcgggaatgatgaaatgattcaggaatggggcctgcaggtcctggacctcttaattattaaaggtgctgtcgtgacagaagctttatcattttgatccttcttatagaacctctgaaccctaaggtcaccctttcctccttgcagctgagggcgcctttcatcttgtgctctcaaaaacatgggcaagaccctaggattgctaagagactatatcatcctgtgcatatgcatctcagctcattcagttcacccagagaggtctatactcaatctccacagcacacagctgggaagtcacaaagccaggtgcagaagagaaaggtcttttgaagccagtgctgtgttcgttgtaattcactggtgtgctgtttcagtgacagttaaaggagaaggagctgggatcatgattcagtggcattctctttttcccctaggataagtcatgactgctcctcattctgaggacagtgatgcctcctggtcttcaggtgaaggcatgtctgttggaggaggcaggaaacaaggccctgggatatgttgcatcttaagcctcatacccccagccccccggcagctgacccttcttccctcttgagacttgctgtgacttctctggctccttcctagtcttccccatgtgttcttcctcacctgcctcaacagactggtccatctcaggatgtattaatcaattccacctttgccttttttcagagagaggcagaaagccctggattaagctggttaggagtctccccagaggagatgcttgaggacaggccagaggaaagaggcttagcctattaatggcagcttcagtgcctggacactggccagggaggccatatcaccttcagaatggagcctgactccttagtaagacttgtataaggtcttcggttcctgtagccctatcagccttttcttgttacacctgtcttacctcctggaattcttcatgtctgccatgttgcatgacttgctgttccccccatttgctgtgctccctttggctttggaattcactgaccccttgcccgaaagctccttcccacacataggagctgtgttccttaggactccactgagatatatcacgtcctccaagactccgcttaaccttgattaggggtctcttctttctattcttataaccaccacccccacatgtgcttttcatggccataaaaactgtacacactactttcttattttcttacatcctctcctactcgccattaactcctttagaacagggactgactgcttcctttcctagacatattcccagggctgagtgttgtctctggcacacagtaggtgctttataaatattgttgaagtaaagaagaaacacagaaaggatagcaggggatagtgcccagcacttgactcaaggacagaaagcagatagtttcttccatctttatgtctggactaaaatcaagaggtatttttgctcagacctttttgggccagaagtgtccccataaaatggtgtgatttgtgggagttcatagaagtcaataagaaaaacaccacacctctaataagaaaaaaagggcaaaggatatgaagagacacttcacaaataaagaaatacaaataaatgatcaacacataggaaaagtatccagtgtcactagtaaattttaaaacattaaacaaaaataaaaattagataccattttcatccttcaatttattacatattttacaaaatgataataccctttattagtgaggctgcactgagatgagtcttacaccactgtgttagttcatttgtgctgctgtaacaaaatgccacagactgggtaatttgcaaacaatggaaatttatttttcacggttctagaggctgggatgtccaagaccaaggtgcctgcattttgtatctgatgagagtccgcttgtgccttcacatggcagaaagtggaaagcaagcaggctaaattcacgcctgcaaggccttttacaaggggctgtaatcccattcatgagggtggagccctcatgacttcatcaccttccaaaggccccacctctcaataccaccgtcatgggaattaaattcaacatgaattttggagggaacgtcaacattcaaaccatagcaaccaccaagcaataataagcaccaccacagggcttttcatttcttttttttttcgtttgcttgtttatctatgatttaaatgtaaataagcattaggtttcagtagtgaataaggatacaaaaggcatatgagaattgctgtcttagtgacattaacatttttggattatgaggtatcataagggatatttacaaatatgtacagtctttatacttcccctcgtagagatacagtggtcagacacctttcatgtctagtctctgcaaacttaaagacataattttcctgcttgttacttttaacaaatcatatttttagattattagaacttaacgtggccatgcatgatggcttacacctgtaattccaacactttgggagtctgaggtgggaggattgcttgggtccaggagtttaagaccagcctggccaacatggtgaaaccctgcctctacaaaaaatacaaaaattaggcaggcatgatggtgtgcacctgtggtcccagctactcaggatgctgaggtgggaggatcacttgagcctgggagatggaggttgcagtgagccgtgatcatgccattgcactccagcctgggtgacagggtaagaaactgtctcaaaaaaaaaaaaaaaaa

SEQ ID NO: 58298 - DNA, 4764 bp, Homo Sapiens
  misc_feature (1305)..(1305): n is a, c, g, or t
atagacatttgccagccattcaggtagagagcattctagttagagctaatagcatatgccaaggcacaaagatgtgagaacatatggggtgtctgggaaacttcaagaagttcaatgtgctttggacaataaagcaaacaggtagaggagtagaaggaacagataaagtctggcaagtaagcagtagccagaccttgagctttttgtgctcaacgaaacttagattttgttctgcaaacactatcaagatactgcagataattaagagcaactaatatttattgggagcttattattctgctggtgctgtactaagtactttacatgtaatagctcaggcttacaagaaccctacatggtaggttctgttactgtgttcatttaaaaatcaaggattagaagctaaataactcatctaaggtatgcataaatagtaaattatacagctgagatttgagtccaggtggtttggctccagaagttgggctcttaacaactatgtcacattgtttcttatgatgaaaatggattctaaaaacaatttaattaaaatatgaataactggccaggtgcagtgactgacacctgtaatcccagcactttggaaggccgaggtgggcggatcacctgaggtcaggagtttgagaccagcctggccgatatggtgaaactccatctctactaaaaatacaaaaattagccaggcgtggtggtggcctgtaaacccagctactcaggaggctgaggcaggagaatcgcttgaaccccaggaggcagaggttgcagtgatccaggattgcgtcactgcactccagcctaggcgacagagcaagactctgtctcaaaaaataaataaaatttaaaaaataaaatattagcagctaatgtttaatgcaacctagataatgtcctaaggtcttcaaatacattcatttaatccttataacaagtgtatatgtttagtactattattattcctcatttatagatgaggaagctaatgcatagtgatgttaaaatattgctcattttaatttttcttctgtctgctccattacttgtcctttctagtatatagattgcaccattattgtcattattttaaaatatgtgcacttctcacatctctcctaatttttacttgtgaattgagctatcagttttatattgtgttgtcaattgagctaacaattgccttgcaagtaatgtctttggggaagtgccaaaagctagcctaaacttccgtgttatcaggtgattatcttgttcatgggttgcagggagggaagagaagagcctattaangggtcatttggtccatctgtactcttggctattgcttctctagtcttactggaacttcagcactgccttgagtttacacttcactattgctttttttcatcaaggcagcaaaggaagggggcagtatgcggaaatgaaaaggccaaagctctcgttcctgcccattcttctattttctagtcaaggctgcagttcacctcatgctaaaactgtgctagcctttgtgccctgcggggtcctcagccattttacgttaattgcaagtattgctttgagagctattagccttcccatatcttgtggcatcttcagggttgcttggacaagaaagccagcagtctatgctaatttgttatctttttaagaacccaaagtgtactcattttagaagcctcagtcaaagcaaaatataaatcttgaattttacttaatatattgggagtgattatgtttcataagaagtaaaagtgaaaggaagaatacctacatggatacatttagagaagatttcctcttgaatgtgaacagaaaaatttactgggagaatttactctgaagttttgctgattttatacaataaatagcaactgttacaagtctgtctgtttaacatgtatttcaaggttttcaaaattagccctttctctttattttttgtaaaattcaaatacaggacttaatgccaattacagaataacatacactaaagaaaaaactgtcatgtcaaatttaagataatatgttttaaggaatgattttggtctgattccagtatatttaggtgttctgttcatgtattaataggtttaaaatgctacctgaagttctatatcgtatcttcacacttgaaacaattctgattagtaataatcaggttggatctgtggaccctcagaaaatgaagatgatggaaaatctgaccacgttggaccttcaaaataatgacctcttacaaattccaccagagctcggtaattgtgtaaacttaaggtaactacaccattctactgcattgtttcatttattttattgatttgttgaagtgatttgtttttctttttcagataaatttgcaagaagttaaagtaacagatttaatatcctgttaaaaataacaagtaacaaaacccagagtcccaattctgtttttcaaattttaccaaatgtatatttttagttttgcttatatggtatatgtgtgaatataataactaattatttctagtggcttttcgctatcactgtgtatgtttataacctgaatctctactgcataaaaatgtcggggaaatattaactccttagctttgaatacagggtttttttttttttttttttttgaaattgattgcagattaccaccattctattttgagtccagtacagtctttctcactctttacatctgctgttccctcagcatcaggtacttttaccctgttttcatcaataattggcctattgaatgtcacctttgaaagccttccctgtcctccaagcagaattagtccctgatttcccatcatgcttcatttggacttatttgtacgatttttgggtctttctttggaaaagagttgtcccagtgcctaaaacatagtaaacacccagtaagtgcttattaagtgaatataaaggaggtttgaggtatcgacagaaagccaagtggttaagcagaatgtgtcagaagtaatttaattgctgaaaactgcatatgaatgatttggtatattttacttcactggagcaacactggtatctgctctagtacctcatgttagtaagttataggagactataaatacagttgattcttattctttgtggcagttatgttctatagacactctgaacacccagttagtgaatactgacctattgcttctgggggaaatacaggggttaggttcttgcaagagtctagtcacaacattttcagcaaccagtcaatatataactttgttatatgtgtgtttctgtagtaagatacttcatttaatattactgttgtgtcattaacattgaaatcatggccaacagcactataattcatgcctgaacaaagcttacctgacacatgtatttttttcgtaatccacatttgtccttaggaagactagacagtactttagcattatacttggtgaccatttaacacagtgaaatcaccaacaaaggtatgaaaatttgaaaagcgtggcactaaatgaaccaccaaaatgacccgtttacagtataagagctgaaacaagaagacaaagcatcaccttgttcagtctcacctgggaacatgcccgtggggtgactccaattttttgctcctctgtgcctgtttatgaatgacctcggaagtgccacacattgatttgggggtataaactttagtgagtaggcaagtttgcaaatatagcacccatgaataatgaggatcaactgtaatcaactttttttctagaaattaagaaaataagtctttaaaagaattcccaagaaacagaaatatttgaagatataatttagatcaacaatatggttgagtcctttgatttttgtttacataaacacttaactgttaaaaataataaaaaagcctctcttaattgaagatattttattatataatgaaacaaaacaagctcttaaatcttaagttgaactctcagaacatgtaaatagatttatatatgtgtatctgctcaaaggagggagagggcagaatgtgttaatgttttgggaggcagggggtggagcagtggtggtgatacattgattacattacagtccttggcttggatgactcatgctgatatttgtttaaatcttacttgaccatttagtatacagtcacttaataaggttgagaaggctggataaaagggtggttcaaatcacagctccatcatttagtagctgtttgatcttagacaatatttcttacccccctaaatttgtatttcctcatctattaaaacagaactattaatggtacttacatcataggattgttgagaaaataggattgttaagagtgactgaatataaattacttggctcagtacctttcacaaagtaagtattcaattaatatgttttgggttattaattagttataattctaatgtttaaatgttcagatatgaaaaggggcaaatagctcaagcatggtggttcactcctgtaatcccagtactttgggaggctgaggcgggcagattacttgaggccaggagtttgagaccagcctggccaaaatggcaaaaccccctcactactgaaaatacaaaaattagccgggtgtggtggaacacacctgtaatcccagctacccgggaggctgaggcatgagaattacttgaacctgggaggtggaggttgcaataagctgagattgcacctctgcacttcaggctgggcaacagagtgagactctgtctcaaaaaaagaaaaaaaaaaaaaaag

SEQ ID NO: 58299 - DNA, 3888 bp, Homo Sapiens
cctcagattaaggatatctggcttctctttaatctcttaatattttcatttttgctctagggctcccaatattacaagtctgttcttgacaaggaagttgggatgacagaactactgtatgaaaactcagaaatgctcagaagtgcagacctttggttctgttttcttcctcatcagataggaattttttttaactacgcacagaatcacacttgcgaagtcttcttttccttcttgttactttatttagaagccgtgaactcaagaagtaggtcccatgttgaatctacatgtgcgcaggtgattcttttagccaagtcatttccacactcatgcccaagtctggagatacacaggtatgtggaaatgtttgaaaagcaaaaccaggttgatgagactttcaatctcttgataacctgtcatctaacctctgagggtccactctggtaaatgtcaacgtcagacatgctacctctccaggtcaccttggtcaagtgcactttcagagcagtgagagcaccatagaaacttgatacatagtttgtttgcagcaaaagagagaggtagatattagcatttccaaaagagctacttaaaacaattatagtaggttgaatatgagccctataataatgtcacccttacttctgttcttacatgttctgacaaggaaaagaccgtgcctcatctctggctctcagaattgtccatcatccacagtctattttatttatacctacgtggtaactgctaactcaaataggcgtgatggtgaccgattatcattgtgtttccctttgccaccaggtgcgggtttctgacaacatcaagatatgaaaggttgtcactcactgaacccctaatgtgtgtttaactgttggggaagaatgggaatcactgccctgagacacagaatttaattaggcctgcttctttgtgtttctctttaatgataggattttaagctcaacggttatcagctcaaaagcagaaaatgttcattcccgtttgtgccctggtatcttgaagaatgtgcaataggtgagcttgccattaatctaactgaatttctccctgcttgtagacattatggttttgaaaacagccttctaagagtgcactaaagttaccctaccctcactcatcatctctactctgcaagtctaaaaatgtggcgtgtgtcagggtacacagtaagacaattcatttatttttaagtgtttccattctccactcatttcctcatctgtgcagtgaggctgagctagaatttagctgtgtgttcctaaagaaatgtgctcactgttttcacacattagccttgttcctatgctgggtctgattacatgctgatagattctggttttttttaagcaagtaattctccttttcccattaaatgcagaggtagagggaggagtttcatccggaaatgtccctgattgagactgtcttctaggttggtcctctttggctcgaacagagggaaccactgcattaggcttgacagaggtctcatagttcagcctggctgtagccctggaagtcagttggacagcagttgcccaagatgccatgacaaaatttacccatcctgtgccctcttccacgtgcgtgctgctgtgcttactggaacaggaaaacattgcgttgtcttctgctaagtgggaataggacatttggctgaaaagcttcttatcatgggctaatatgtgctctgtccactcagctcagggaactctctcattttattcccacaggctgctgcttaagttaatgatttctttgatgacaggttctgcatgaattcactttaacatcgttgctctgttttctactcttttttttctccctaaaaatgtgagctctaatttgaagctaataagttttgacatgcaagcaaccaaattactggatagagcaaggagaatattttattagtaattttgaccagataggatggtaaggtcagttaatgaactaatgaacctcagggttcatttttttataaccttaccgggactggatttctttctttctttttttcttaagctgccaacagttcttgtcaggattcaatgtagatgctgctgctggctgtcctggtggtggtttgatctctgttgtgtgggcttcacaaggggctctggttcagtgattccagtaatggctaccactcggtgaccacatagtgtgtgctgcacactggatgtgacttttttgtccttccctgcattggtgcttctgctgtccactcactggtcttagaggtcctggcttttcttcctgaggatcgtgggtttgggcctcttttcagaaggagcccagtgtgcaccttcctgactggcaactctgctttctttgtcctcctgctgttctccctcatcaggttcattagcagttcagctctcaggacttagttttttggggcatcccatctcttaggcagtcttttcatgtaaagacattcggaaggagagcatcctctctattctcagaaatgttttgaaacctgttttctcagtgtcttgtgtctgcctgcagctcccaaccagatcttcctccttggcctttacaaagacgaggttcatttttgttgacttgggtttgcttctgtctgccatttcaatgataactgtgttgatttttagtgagtgaatcatatgaaaatagcaatgagagcctggagaaacatggggtggagaagaggaggttacaagcaatactggtttcttttgtgaccctgagaaatctatcccatactagatggatttgccatttgccttcttctgacaggtatgaaattgtcaaagtatgtaaacaaacaaacaaacaaaaaaaccacaccacatttttagaagaaagctccattggagtatgtattataggattcttctgcagagcattttcatgtaggttatcatgttaaaataagctagattaacataatgtccttgggaaatgatgatagcccaatgaacttaatgtttgtttttctgaaggattcaagggatattcttgaatctgagaatatgtgatttcattacactcctaaaccaccaattctgtaaggtgaaatttgaagtcctattatcaaataggcctatctctctagaaaaataaagtcatgatgctaatttgtctaaaatcttgattaatgccctgtaaaatactaaatttatttagtgtttaggaaaactctgaaaaggacacaagctttagtattgcagtttccagtgtctaaaattccatgtttttttcattttaggagggatagtttttggttgttgtttgggcttggaagagaggattttaaaggaagagatacaaacagcccatgatttaagaagaaaacattaagcctcgttaatggtaggtgttaggggaaaaccctaacattagcctctagcatgagggagtgaaattaacatagtcacacatccgcaacacagcagtagtgtattcatttattaatagctgggtacaaaaaaattgtgaagacatgtgcttggcaatgactacgatgagaaggggactatgagaaatagacacacacaataagaatatttacattttgggccgggcgcagtggcttacacttgtaatcccagcactttgggaggccgaggcgggcgaatcacaaggtcaggagtttgagaccagcctggccaacacagtgaaaccctgtctctactaaaaatacaaaaattagctgggtgtggtggagggtgcctgtaatcccagctacttgggaggctgaggcaggagaattgcttgaacccaggaggcggaggttgaagtgaactgagatctcgccactgcactccagcctgggtaacagagctactctgtctcaacaacaacaacaacaaacaaaaaaaaaaaaaa

SEQ ID NO: 58300 - DNA, 3517 bp, Homo Sapiens
taaactaggcctctcttcaggcatcagaaccaaattagagtgctttatacgtgcaaggaactaatgcagaaagacattatgggtaagtcaagggagatgccccagccattgggcaaattcctctgactcctccctgatggaactaattctttttcttctgtgcccggatcctagaatcaagattcttaaggtctgagtacaagttccgcttcaggatggcgctgctgcacagcagggcaccttgcagggccccgaccagtccacaggtgaagatatcctggcctaggaggcaagagcagaggcccctgagcgtgcacccaggcaggcccaggggagggtggggccttggtgctcttccctccacatgagggccacccagagctggctccaatcagacaggggccacagcctgcccaggcagccctgctcaggggatgggaggctgcaggggacagcagggcctgagggcaggaacagaggacgttgggcgacaggggcccagggtctcaggtcctgacaacatggggcagtgagtatacctgtcagatagaggttggggatggggctctgggccctcaaggaggccatcacacaagggtgcaggcggcccaggtcatggtcagccccgtagcaggcacctcggggagcagccagatagaactggttggtgagtggggatcctgcagtcacactctccacctgagggcagaaagggtggggcaggcatgtgagatcctggctcccctccctcttccgctctttcccattcactgactgcagggatgggtgccctgtccttccctggggctcatgtcttggggcccaattcccctgtctcaaggaaagggcagaaatagcaccatgaggtccgtcaccaccccaaatactttaccccctaccttcccctccagctgtgggaacagtttcaggaccactgacatagaggcttccacaaaggagtttttgaaggtctcatagtcactgccctactttcccttcagttccacctgccactcctcaaaccactcgtaggtgctgggtatgagcatgatcatggtggaccggcctggggatcagagctgatattactactgcccggcctctccctccaccccctcacccaggacgtgcaggcccccgtgggaatcggtcctcccaggtcggatccttggctgatgggaaagcgaagaagagaagagggatgtgttccgcagcctcttccctgggcatggagatgtagcgctccatcctgcgtgtgacaagagtgtggtgcgatctccaggcttttgtcctcaaaaccccagaaccactgcaaggactgctcgtccctagggactccccacaggggtgaagctgagccacagccttggtgtgacaaacttccaggtgcaaattggaaattgcctacttcctcccattccataacttctgctcgttctctgagtcaagcagggaggcacgggccacacacacacgtgcaccttacgcctggtccatgtccgtgtcatagtaaacatagtagttggtggacggcagatgcaggtcctccttggtgcctcgcaggcagatgaaaacagaggtcatgcctaagccgggctgaactgtccccagctgctgcttcacacctgcaaaggggagtggttggtgcctttgtggaccatggccggagacagccactccctgctcccaggagagcctcagggtgaccgctcgctgtgtcctgagccttatcttcagttgccagctttgtgcccaggccacttttacagctgtttcaacttgatgttggcaggggcctgctcttctgtgtcctcctgcctgggaaggacactgccccaggttcctattcttccacctcccctgcctctgctccaagccccttcagaggcaggtaaagcccagccctggtcctcagcccccatgagctggctcagcacctgcaggaaggtcaagcttactgcctcccatcttccccttcgtgtcttgaagtgtggagcacatgactgggttccccccatgaagaccacacatgaacagcagctcattaccagcctgatttcaggatgaacttttatgcagtcacggagtgagtgaacatgcatgattcttagtgtgacatcagaacacaaggcctccagagggatgccaatgcatgtgagcaaaggcaggcagcctgactggtacttggcatctcaggactcagctggagggaggagggaagaactacactatggcagaggccacagccactgtggggcacctgatgttccccagacctaaacagctgggcttccccactcctcagcagatgacctgagaccggtgttccggaaactgcccccacagattcttctgctgtcttcccattcccgtgccagagggatgccgggtccctggctcctctgctttttccattttttaaaaaatttatttatttttagatggagtcttgctccgtcgcccaggctggcatgcagttgcgcgatctctgttcactgcaaccgcctcccgtgctcaagcgattctcctgcctcagcctcccaagtagctgggattacaggcatgtaccaccacacccactaatgtttgtattttcggtagagatggggtttcaccacgttggccaggctattttcaaactcctgacctcaagtgatctgcctgcctcgtcctcccaaagtgctgggattgaaggcgtgagtcaccgtgcccggcctgcttcgttcatgtaactaaatatttgtgaggccctcaggttgtgttcaggaggaagagacacaggaacacagatggagggcaagagggacagatggctctagctgggctgcctgggtgagatgctggggcctggccaggacagtgtcagttcccagaggtcctgggacaggggagaagggaggtcagggtcacagagagagaggcaggaagtagcaaaggcagagtctgcctgtgcaccaagcccgacccccctgctctgcccctgggccgtctctacctcaccccctcagctcccccggtctgagagaggggaggccgagcaggctgcagacccagccacatggggcaggggaaggagaggctggcattggtggagccacccactgcactgccagtcatacaaagaagtctatcacacagaattatgtgcagtattttttttttttgagacagagttttgatcttgtctctcaggctgggttgcaatggcacaatctcggctcactgcaacctccacctcctggcttcaagcgattctctggcctcagcctcccgagtagctgggactacaggcggccgccaccatgcccgggtaagttttgtatttttagtagagaggtttcaccatgttggccaggctggtctcgaactcctgacctcaggtgatctgcccgtctcggcctcccaatgtgttgggattacaggcgtgaaccaccgcgcctggcctatagtactttttaatgaacgaaatgactatgttactggtttatgtatttgctatatttttattgttttaaac

SEQ ID NO: 58301 - DNA, 3483 bp, Homo Sapiens
agtgcaaagagcgcagccgtgtcggccggcttgagagttttgtgctttctagatgaagcgcgtcttcgcatacgtgcggtcgcgtgatctcacaagatgcttggcatgtgagtattcttaacagactcattctacatttcgggaagttgagagaggtgcagtaatttggccaaagtcacgcggctaataactacccaggactggagctcagcgtggatgccatcgcttcctccacccgaccgagctgccttccccgcgctttcgggggatgctggccgcccactcccacacagctgtctggcaagaacctcctgacagcctggaataccctcgtcgtcgctaccgacggctaccaccttcacctgtacaagcccttccctgtcaaagtaaaggttgcagaaaaccttccctgattccatggtaggcactcagtaaataaacaggcaacctcaagttatttcttccactcattgattcaacgcgtgcacgggactattctttgagaagcgtaccccaccctctgctaggcactgtgccaaaagcttttcatgcattatctcttgtaatcctccctacagccctgtggggagatgcttttattgtccacattttaaagataaggagacaggccgggcgccatgtctcacgcctgtaatcccaacagtttgggaagccgaggcgggtggatcacctgaggtcaggagttcgagaccagcctggccgacatggtgaaaccccgtctctagtaaaaatacaaaaataaggccgggcacggtggctcactcccgtaatcccagcactttggaaggccaaagtgggcagctcacctgaggtctggagttcgagactagcctgaccaaaatggagaacccccgtctctactaaaaatacaaaattagccgggcgtggtgggacatgcctgtaatcccagctacgtgggaggctgaggcaggagaatcgcttgaacccaggaggcggaggtttcggtgagcagagatcgtgccattgcactccagcctgggcaacaagagcgaaattccgtctcaaaacaaacaacaacaacaacaaaagccaggtgtggtggcgcgggcctgtaatcccagctactcagaatcgctggaacccggaaggcggaggttgcagtgagccaagatcgcgccgctgcactccagcctgagcgacagtgagactccatctcaaaaacaaacaaacaaacgaacaaacaaaatcgctaaagataaggagacagatatggagagagtcacacaactagagggcgcctaaccagtggcaagaactcttctttggcagagttatgagagcttcagctgacgtcaaaacacctggctctgggctggaatgaattacccaagaatttggttggctttagctgaagtgcagaggaagctggcaaggtcctggctaactccttcctcaaatatgtactgagtaccttcagtatggcattgttgctggcactgaaaacacaaaaatgaatgtcacaaaatatatgtcctcaggggtttttaatccattaggaacagacatgtttaaacaaatgatgacaatatagtgatataaatgttttaatggagctttatctagcggagattgcagtaggatgcctagaagattgagttaactttacctgttggagtggagttggaagcaggtggggagaggttcataggaaatccaggaaggcttcccagtggagatgatgcttgaactttcttgaagaatggtaggagttctttacataaagggactggagggaaaaagggggtagatccagatgcaggggaactgtgaattcaaaggcttgctagggggcctccagagagtcatgtatggcttgagctacaggattcaaatagaagatattcaggggataacaacaaaaaaagaaggaaaggagtttgtataccttgcagaggtcctcttattgcagaggtctacccttagtggcattgggattatgtaaatgaatggacactaaatgaatggcacagatacaaatgtaagaaatatggcagagtgtgaattttagttgcgtggcttctgtgtgctcgctgagttagatagaatgtgacactaacagagtcagaggccagagtcagcctccaaaggcttgcctctttttcaagtcctcagttattctttctaatctagtagctgtcttgcaggtagggcttgtcagttcacagacctgggtgccatcatggctcaaggatgatagctggtcagtgcagagcccccaaaccagaaaaacatcacaaaattttgttttttagaaatacagcctcacaagaagtttcaaaaatagtacatagagtcctgcacaccttcacccagtttcccccaatagtaacatcaaacataaagacagtataatagtaaatcaggaaattgatataggtattatgcaataaggtttttttggtttttgttttgaggtggagtctcacggttgtcgtccagactggagtgcagtggtatgatctcagctcactacaacctccgtctcctgggttcaagcaattctcctgcctcacccttccatgtagctgggattacgggcgcccagcaccacacccggctgatttttttcctatttttggtagagatagggttttgccatgttggccaagctggtctcgaactgctgatctcaggtgatgcacctgcttcggcatcccaaagcgctgggattacaggcatgagacactgctcctggccataatgcaataaggttttttgaaagcatcaacaagcttctcaaaaactgaatcaaggttctccagaccctaaattttaagaatatcctcaatggctattttactacaaaagtaacatagctcatgctttaaaaaatattatacaaggccaagcacggtggctcacgcctgtaatcccagcactttggaaggccaacgcgggtagatcaactggggtcgggagttcgagaccagcctggccaactggtgaaaccccatctctactaaaaaaatacaaaaaaatggccctgcgcggtggctcacacctgtaatcccagcactttgggaggccgaggcgggcagatcacgaggtcaggagatcgagaccatcctggataataggtgaaaccccgtctctactaaaaatacaaaaaaaaattaactgggtgtggttgcgggcgcctatagtcccagctactagggaggctgaagcaggagaatggcgcgaatccgggaggcagagcttgcagtgagcccagatctgaccactgctctccagcctgggcaacagagtgagactccatctcaaaaaaaaacaaaaaaaacaaaaaaattagccagctatggtggtaggcgcatgtaatcccagttacttgggaggctgaggcaggagaattgcttgaaaccaggaggcggaggttgcagtgagctgagattacgccattgtactccaacctgggcaacaagggcaaaactctgtctcaac

SEQ ID NO: 58302 - DNA, 3474 bp, Homo Sapiens
ggtttttggggatagttaagcccaggccttaagacagtttgatattcagttttgttatttaggtctgggttagggataccgccagagagcatccaaacatttctgtggttgggaaggctagttatctgtgagcattccagatgaaatagcctataatgggttatcaccttttgatcttacctcagagaagattgaattggatctacctatctgatttagcagaattaaactggatttggatggaagggtaatcagctatttaatttgccagttgttagttagcatttcttcttgctgtatctcaaggatttactttgaatattctgtattttctctttcctgcccatgatgggttttccttttaaaatgctcagcacaggctgggtgtggtggctcaagtgatctgccagccttggcttcccaaagtgctaggattacaggcatgagccactgcactcagctagaagaattctgataggctctcagcatccattgttccaggtataacaattctgactttttcagatactctgatgcttttatggtatcctgcttgctgctgtcttcttttgaaattggagttcaatcactctgcttttctttcttaatacttgtctgtttcctagattttacatgcttttccatgaacactaatttcctgtatgaagagggaatatacaaatgataggatgctttcctgtaactgagatggcagggggaaggagaggacagcaactcatacagaaggaaatcagcttttgttgagcacccagaatttaccagatcagatagagaggacaggtgtagaagaaaatgagcatgtataaagtggaatagtgggacaataaagtacaaatatggaaaattaagtggaaggcttttaatgctgttagggaacttggattgggttagtaagttatgagactgacatttttgatccttgaaatgtcataatcagaggtgaattataggttatataatccaatagtttagataattaattaaattgggaaataagtcataggaccaataaagaagtgttttgagagtttctcttaaggaatgaagacctaacgagaatagcggcaccgcagtagaagtgttgctaaagtacattggacagaaataagcaattggatattgggaaagaaagggatgaataaaaggtgacatgagatgttaagcctgggtgatggagagaatgtgatctcagcaggtttgtgggtggaggtaaaaataagttttgttctagacctcttgcttttgaggtgctggtaggatattcctgtggagatgtgtagtagaatccgaagtgtgaaactggaacttggagggagagatcaaggctggaaataaaacatgtatgagtaaggagagttaaaaataaagagaaaaagagagcatttgttagctggagtaaaaggaagggtacaggaaaagcatcatagagaagagagaatttgatctgactttaaaagatgccgagtcggtatatggcattctgttcacgagctttccttgttgaggggacatcacatttactaacttgagagataatacatgggaagtgttggacaaaggatactgcatccagaatgacctttctaaactacaaaatcatttcccctctttcctgcttaaccctccctcagtggcttcttatctttcttcagataaaggactgactcctaaatgtcttcatcatcaccaatttgaacacacattgtgtctcacactcctcctcgttcctcactcttcttccccaagactggacagaatgtgaagaagatatgatttccaccagatggagtactctttatacttttttggggtcctttatggttactttttgtggccatggtcaggttcttatccataaaataattattgataacttcctaatgtaaaatgaaaaataatgataaatcacatacttccctcatttttacagaattccttgcttgccttatctcttcaagtgttgactgcaaggttcctgtacacttacttgagttggccactccggtcactataccctgatctctgacacttggccgtggtagcctggagcagcattgttactgggcattgctgtgattgggttacccagctgtgctgatgtggaaacctcagggctatttattgatacttggtttcctaaaggaaagttgagggaatgtattttatgagagggctttatttacacgattaaagaggtttataaaatgtggagatgaatataggtgaaacagagaaagaatgctggtataggaggtgttttcggctgggtttggtggctcatacccgtaatcccagcactttgggaggctgaggcgggtggatcacttgagtccagcctgggcggcgtagtgagacccatctctacaaaaactacaaaaattagctgggcattgtgttgcatgcttgtagtcctggctactcaggaggctgaggtgagaggattgcttgagcccaggaagcagaggttgcagtgagccaagatcgtgccactgcactccagactgggcaatagagtgagaccctatctcagaaaacaaacaaaaatccccaaaaaaccaggaagtgttttcttagggtctagttcccaggcgaatggtatatcctgattctaggtttataaaaatagtatattattcataacatttgtctaaagtgacacatttacatacagtatatagtattgagtaatttccaactctttaaaaataatggagaccctttcatgtagtagtaactatgtttttagtatctgttgactgagaaaatacgtaacagcaaaagctactataaaactttgaaataagttcttgtaaatgtaaaaaaaattctcatatatttggaaagtatacatgtggaaattatgacttatagagtctatggacacttgatttcttgctttatggatactctcaggaagttctggtctcaactttgagtatctcattgtcctcttactttagaatgtggggtatgggggaaaacttctatttgaaaatttgagccatagcggaaattttggaatgacagggaaacaccttctcagaatcctcttacaataaaatttatatatgttatgccagacaatgtactttatactaagactggacttttaaatagtctcatggattagaagtcagatacaataaataaatactttttaaaaattatatttttaggtatatgagcattgttgttgggactacagtgctattttaaagtgaaatttagttgatttgcatgtgagtatacacctacaggtctctgttatagccgtgacatgtcttctgttactataaattacataacaaatccttatggtttcttgggtcacttattttatttaaagacaaaaacatctttcagtacatatgtaagacttaaggcattattgaaaataagcctgtgctacatggtagaatctattaaaaaaaaaaaaaaaaaaaaaaaaaaaca

SEQ ID NO: 58303 - DNA, 3365 bp, Homo Sapiens
gacgaagtgggagcctgtaggctgcagtctgtgttaagctttctgggtgattctgatacacggtcaagtttgagatgtagcaggagaaacaggaaacataggagagaagccactaggggtgggaatcagaaatacggtgtccctgcctacctaggggctacattcctccgggcaagtctttttaactctctctgcctggcaacttccttaacaaagagtgatactaatacctgccttcctgtctttgccacatcacgggattttctacagctcatattggttacagtgatagcagctgagatttaggctgcacctgagtaccaggcagggtcctaagtgacttcagactctatagacagtccctgacttataatggtttgacttagattttttcacctttgggatgctgagaaaaccatacacatccagtagaaaccgaactttacattttgagtttcgatttttttttttcacctgggctagtaatacgtggtaggatactctctcacaatgctaggccacagcagcgagctgcagctcccagtgatcacaagggcaaagaatcgatattctaccaggcacggtgttgcctgataaccttgcccagctgtaggctaatgtgttcttttttatattttctttaatttttttaaatttccacctgttttggggggggtacaggtggtatttggttacatgagtaagttctttactggtgattggcgagactttggtgcacccatcactcgagcagtatacactgcatccagtttgtactcctttatgcctcacccttttaccactctttccctctcagtccccaaagtccattgtatcattcttatgcctttacatcctcatagcttagctcccacttataagtgaaaacacacagtgcttggttttccattcctgagttacttcacttagaataatggtctccagtcccatccaggttgctgaaaatgccatcagttcattccttttcatggctgagtagtattccattgtatatttataccgtagtttctttatccacttgttggtagatggccatttgggctaatttcacatttttgcaattgtgaattgttgtgctgtaaacatgcgtgtgcaagtatgtctttcatataaggacttcttttcctctgggaagatacccattagtgggattgctggatcaaatggtagttctacttttagttcttcaagaactctccacactgttttccatagtggttgtactagtttacattcccaccagcagtgtagaagtgttccctgttcaccgcattcacgccaatatctattattttttgcatttttggtaatggccattcttgcaggagtaagatggtatcgcaaatgcaacaaaaacaaataggtgggacttaattaaactaatcagcttttgcccagcaaaaggaacagtcagcagagtaaacagacaacccgcagagtgggagaaaatctatacaaatctatacgtctatacaaggactaatatccaggatctacatggaactcaaattagaaagaaaaaagctaacaatcccatcaaaaagtgggctaaggacatgaatagacagttctcaaaagaagatacacaaatgaccaccatacgtgaaaaaatgctcaacatcactaatgatcagggaaaggctaatttaagtgttctgaacacatttaaggtaggctcggctaagctatcatgttgagtaggttaggtgtgttaaatgcattttcatcttatggtattttcaactcggtatagggtttaatcccatcctaagttgaggagcatctgtatctgttttggtcctgacaataccccatgaaggaggtgcaattacccctggcttagggttgagaaaactaagaggtttagtaatgtgcttgaggccatgctacctgtaagcaagaatcactccaggtttttcttgtttcaaaactcctgttaacaactgagttgctatactgttttagtaggtcaagatatactatgtgtttcaaagggcttataaattataaatgctacttaaaatgatgtaaagtggtattattgttgtcatcatgtatatattttcaactctctcattggcatcttgaggtttctcttctatgaaattctttgccctaggatggtcccctttgtcaaagagagacacattctgaacaaggtcagacaacacagatggagtttggattcgggcactggtgacagtgaagactcagatgaggttcttgagtactttcaattaggtttaccactgaccccatcagtgtgcagacgaagggagatgagagatacagatggttaatgggatttttggggtatcttccagcctttgtgagcacagaggtttcgctacattttgaaaattaaaattcatttcattcgcattacagattttaaatcctagctcctttttaagcttttaattccaacttgcatttcttattattctgtttacaaacctgacaaattttagcagtcgttttgaggagatctagaataatgtttcatctcatttttgaatttaggtacagaccttaaaaatattatgctacatttctaatattaatatcttgctttcttatttaggaacttttcctgacaaacttcccaagaatgtaattttgttatatccatatgataaaccttaagtattcttaagccaggtgcagtggaattcccctgtagtcccatctactaaggagactgaggcaggaggattgcttgaggcctggagatcaaggctgcaatgagctatgactatacctgtgactagccactgcactccagctgggcaacatggtgagaccctgtctctaaaaacaaacaaaccttaagttttcttaatgttctgacacttttataaatgtagtatttcaacttatggtcaccattctgtaatgattatcatttgtacatttaaaatagaaactgttaggccaatgtgttattctagaataggacttgacagacttttttttaaataaaatgccagatagtgtttctagctttgcagttcagatggtgtgtgttacaactgttcagctctaactttgtatgaaagtagccataggcaatacacaaatcaatgcaccatctgtgttccagtaaaactttatttataaaaacaggtcacgggccacatttggcccatcagccatagtttcccaacctctgctttggaaggcctaactcagttaaacattacaagttcatgcagcacggtgtgatggctcacgcctgtgatcctagcacttttggaggctcatgtgggtggatcgcttgagctgaggagtttgagactgggcaacatggtgaagccgtgtttctacaaaaaaaaaaaaaaaaa

SEQ ID NO: 58304 - DNA, 3185 bp, Homo Sapiens
tcggattggcactcacgtttcccgactccttagtctgtattcttttcaaccttgtctctaatattccatgattccatggttctgatgccattcctcagcgctctgctgttcttgcctgaccaagtggatcaatggtggctctggcatttctataaaggggatttcagggctgcctgctggggagggaggcttgaagctgtgtctgcactgcatcttcacagcactgagaaaatgccagtcattcaggaggacagggcagccctgtcctcgccacagtgcccgcatcttcattggttcacctttgcaggtatcatctgtgacctgtcatccaggctctgagccctgaggataataagtttccctcgaaggtcctgggtttgttggagctttttctccctcttgccatgtccttttcacggtccatcctctgagtttgtgaattatctttcttcgtggcccatgtggcacaagatgaagagtgcatgggcagcttctcccctgacatccctacctccctgacgcttaacccacatagggaagaacattcctgaaacagagacgtcacccagggttgctttctgccacagcaggcactctgcttcgtgcctttctcacttccatttgtaaatgatcttgtctccttccttgtagaaagcttttcagccattccaggctttctctttgggttccatccctctgggattttccacgaattgcatttccttgtagttcattttcatcattttccttgttagggaaatgcacctgagacattggcatgcagcctgattgcccccggcctcccctctgctcattgccagagctacctctgcacagaggagtcactctcctcccactccagggcctctgtcaggggccaggcttgatgctgtcaccagccagctcttcactgctgcccagtgccatattcatatccattgagacaagtccctgggaaatggttgggagccgggggacagccctgcatcctgagatcctaagatcagggaggttctccctgcactcccagctggaaggagactggatcggccaccctcaccaaattcccagattctctgactgaagcaagccagtccttggtttgaatggggaatcaactcagggttataaaatagacgccagccttcttgtaggtagaatctgacttcagacagcaaaagactctaaaacagcttaaattcctgtatatgccttctcctgtgcatgccaccggtcagaccaaaggccacacgccaatcaaggcccaagatcagccaggggtgtttccatgtcctcaagaacttttacaaactgtagctgattgggttccgcccctggagattcgatttagtgggtctggagtgaggcctgggcttcttagaagccccagcggattctaaaatgcagccaggaggaagaacgttgccagaatcccatgaggcacagatgcaaatgtgcatagtgacattgggttgcattatcaatggcaggactgactttataaacctccacatccttactggagctgctgtttgctttttagaaaagtccctcatcagattatcaggaagtcgtgggttttccgtgatcatgctgtggtcagatccagcccaaccagagagccaaaaacaaaacaaacatacaaaacaaacaaacaaacaaacaaaacccaaatccctggcaagccccacgaaatgactgctctgataacattcagcagacaagcctgtttgaaatcatctcagaatcataccagacccaaacccaagaggtcatctggtctatgcatcgactctaggagggtgtattagtccgttttcacgctgctgataaagacacacccgagactgggcaatttacaaaagaaagaggtttcatggacttacagttccacatggctggggaggcctgacaatcatggtggaaggcaaagaggagcaagtcacatcttacgtggatggcggcaggcaaagagacagcttttgcagggaaacttccttttttaaaaccatcagatctcgtgagacttactcactatcacgagaacagcacgggaaagactcgcccccatgattcaattaccgcccaccagtttcctcccacaacacaagggaattgtgggagttaaaattcaagacgaggtttgggtgaggacacagccaaaccatatcagagggtgaggggctatttctccatgttacagacaaggcacgtgaagcctagggacgttccatcacaggcccacaccttgtctcagaattaagaggaaatgcttctggctgccaggggtggggtggggtaggatgcagagcctctccctccaccaccatctccatccttttccctttctctgaaaatctcatttgatgattccccagcctggctgcaaattaaagatttgtagacctgaaagatgctaccgatggttatcagcaccaccaccaccatcgtaacagtaaacatttatggagcgccataattattcataataatttttatgtgttaaacaaatctgacctagctctataaagaaataggccctgttaaccaaaaatattggataaattaaaagtctcctagaagcatctgatgaaaggatctcaagttccataacacacggaccattcagtggtgttgtttctgggcttgattcactgtgggtcacttgaacgatgtcgggggtattgtccacctcccagtgctcagtctgtggcttgtggccagctgttcctctgtggggtctatgttggctgtgttaaggcctgctgcagaaacatctcatttctagcatgtttttctcaagcagtgatcctgtggggtcaagtcttcaatatcaaataatattgataataattatgatagaaataataagaggccaggcaccgtggctcacatttgtaatcccagcactttgggaggcagagttcaggtggatcatttgggcccaggagttcgagatcagcctggtcaacatggtgaaacccagtctctactaaaaatacaacaattagccgggcatggtggtgcacacctgtaattccagctactcgggaggctgaggcaggagaattgcttgaaaccagaaggcagaggttgcagttcgctgagattgcaccactgcactccagcctgggtgacagagtgagactctgtctcaaaaaaaaaaagaaaaaaaaaaaaaaaaa

SEQ ID NO: 58305 - DNA, 3024 bp, Homo Sapiens
atgcccaaaagttatttgggattagagcatcacaatgggaatacacatgccatagtaaaccatgtgcttattcagggaggtaaaggcaggcaggtttttaaaggaaaaaatgaggattacataattgttttggaaataattacccttggctacaaagatcattaacaagggtaatgccagttcaagtttgcacaggcagtttgctgggcagatgtccttgtagaagtattttttgtataaggtttaatggcctttgtgcagggttgtgttttttgtagtcttttttgttatcaggcatacaagcatgagaaccttattttcatggcctttcccagctctgtcaggattttcttcacattcatgatttaattttgattttgacaactttcgtagttattccattaacttgtaattgtatgtgagaaaatactataaagaaggaattgggctggtctgagtgcagtggtcgtttacatctaattgatcacaaccagttacagatttctttgttccttccccactcccactgcttaatttgcctagcttaaaaacaaaaacaaagaaagaaagaattggttaagcaaatattcaggaataaaacttcatgtgtcatcataaaagtaactttaaaagcaaacattttaaatatacattttaacataagtttgaggggacttatctttttcaatctgacaccgatctaaatagtttttgcttcatttacttatttatgaatgaatgaacaagacaaggtcttgttctgtcgcccaggctggagtgcactgacaccatcatggctcactgcagcctcaaactcctggcctcaagccaccctcttgcctcagcctcctgagtaactggaactacaggcatgtgtcaccatgcctggttaattttttttttcattttgtatttttgcctagttaattaaaaaaaatttttttaagagacagggtcttgctatattgcccaggctagtttttacatctttaaaactgaatacttagctgggtgtggtggtgcacatgcctgtggtcctagctgttcaaaaggttaaggcaggaagattatttgagcctaggagttctgggctctagtgcactatgctgactgggtgtccacattaagttcagcatcagtgtagtaaactccaaggagctgggagccaccaggttacccagggaggggtgaactagcccaggttagaaatggagcaggtcaaaactcccatgctgatcagtagtgggatcatacctgtgaatagtctctgcactccagcgtggacaacatagtgagacctcatcactttaagaaaaacaaaccctgaatattttaagttagagatggagttagaaatacttttagttatagcagaatcatgtcaatttttagtacatcttttacttagctttttgcacacttttttttttttgagacggagtctcgccctgtcccctaggctggagtgcagtggcacagtcttggctcgccgcaacctccgtctcccaggttcaagcaattctcctgcctcggcctcctgagtagctgggactataggcacccaccaccatgcacagctaatttttgtatttttagtagagacagggtttcactatgttggccaggctggtctcgacctcctgacctcgtgatctgcctgccttggcctcccaaagtgctgggattacaggcgtgagccaccatgcccagcccctgcactaattttttaaacaaagtcctgttggtgctcccttcaaaatttatctccagtctgaccattttaccacttctgcaacaacccttctgactcagccactgttctgtttggtttgggttacatagtggcatcctacctggtcttcctgtttccactcttataccactagaccatattctccataaaccaccagagtgatcttttaaaataaaagcataaattatgttcaaaaccctccagtggcatccatctcatgtaaataaccactccttcctacaagatgccacctcacctgccccgactgcctcatgatagttccctctgcacaatgcccactttgccacagctgtgtgctcctgctggctcttggatgagcccaccagtcacacttctgcctgagggccttgcacatgctctggttgctgcctgagatacttatccccatcactatgatcaccttcccagagaggcatttcctggcctccctatttcctcaccaccatcatttctgtctgctgactctactttgtctgttggttgatttttgcactaagcgtactaccagaagctttcctctcaatttgctttcccacagtaaaagagcagggcctttgccttgtccattagtttctcctcagaacagtgcctcccaggtgttcaacaaatacttgctaaataaaagatggctgatagcaaaaatatttatgtctatgtatagggacttagtttttattgacattgtgcttttattccctagagaccctgaaatatggcgtctggcctgcttgaaagtttggggcagaagctgtattaaacttgttccgtacacgtcctggagagagatgtttttagaacggcctcgtgttcggtttgatggtaagttggattctgtagaactcagcagaaatactgatctataatgctgatttttataaatacgccgtttaaattttctgtgatgaatgtgagtactgtaagcatgtttaaaggaaaccacagtaaatataatgccgggaatatctgaatattataatttttaactttttaaaattattttcataggcgtgtatatcagtaaaaccacatatattcgtcaaggggaacagtctcttgatggtttctatagagcctggcaccaagtggaatattacaggtacaactgtagtacactgagtgagtggaaaattctctctctccatgtattagttaaatggacatctgttctttgttgcttttgattgacccgcaaaatggccctcagtatttttatctagtactcaatgtaggaattgcactaaaaaaaaaag

SEQ ID NO: 58306 - DNA, 2772 bp, Homo Sapiens
cggacgcgtgggtgtgtttgtgttttgtatttttagtagagacagggtttcactatgttggccaggccggtctcgaactcctgacctcaggtgatccacccgcttcagtctcccaaagtgctgggattacaggcgtgagtcaccgcgcccggcccctgaagcatagttttcaatgaagagtcggcttggaaagcggtaggatttgtcccaacttcccagggcgtagtggaaggtgaaataagaccacagatttatcaacctaatccttagagacaacattcataaacatgaactgtcagttcatccaaccttctctccttttcagatgaggcctaaagagattaagtgacttgttcacttccattaatttttggtggatataggccgggtatggtggtgcacacctgtaatcccagcattttgggaggccaaggcgggcggatcacaaggtcaggagttcagtaccagcctggccaaaatagtgaaaccccgtctctaccaaaaatacaaaaaattagcaggacatagtagcaggcacctgtaatcccagctacttgggaggctgaggcgggagaattgcttgaacctaggaggcagaggttgcagtgagccgagattacaccactgcgctccagcctgggcaacagagtaagaatccatctcaaaaaaaaaaaattggtggatatagtatttccctaaagccctggagaacaggtggtatatacagtattacatagtgctatgctgtctgatattgtgtgtacagttaccttaacactctgtacttgggtaactttgataatgcagatgtagaaattggcagtggtggtaatgatgatgagaatgatcatgaaaatcatgagagagcagctacctgacatttattgagcacttactgtatgctgggcaacatgcttacacctattagctgtaacacaataattatattattgccccatttgacagatgaagaaagtgaatttagaggttaggcttgcccagtgtcacacagctggaagtggcagagttagcattctagctcacatttgcctaatttcagagcctgagttctaaattatgaggcttaccactaattattggggagggaaaggatagtatttatgatgctgagaaggaaagttcctgagtggtaccaggaatgacctggaagagtgaaaagccctaagagggattggaccatccagtgagcataggggattgtgtagatcaggtgaaaattggacctgcctcttcaacccacaagagaaagtgcagggcggagaagaaacctcaaggaacggagttgagctttgaaaggagaagttggctacaggtgctggagagggctgatggaatgtatttggggcagaggttgagatcctggccctcccatgtcacacaccctaaattgaggccacatggctgtcagtgaaaacaaacccaggtgctggtttcaataaaaggtgagactaggacacaaagaagggtagggagggcagagaacagctaaggtctgaacagctctgcgaagtaggtacatggctcccaggattatcagacacatttttcacatgggaagacagaattttcaagatgttaagtgactgttctaaatcattcagctgagactttcagtccccatatttgggatatttgatgtagagttatacaggtttggctacagaaggcatgactcaggcagagagaattagaggagccaggaagagggcagaataggcacagcctctaaaccagcaaccgtgctcacagcagcccagaagcccagggggagaacatgtgtgttcaaggtggttgcatgttcatggtaataattacactaatacccaataacagagaggttaccttgtggttatgagcctgggctctggagccagcctgcctcaagtcctacctctgcatcttctcgctatttatgttctgtcagattgttttccccctctgggccccagttgcctcttttgcaaaattagaataataattatacctcataggatgttgtaagagtttattaagcatgtagagcaggagtcagaaaccttttctattaaggactcaatagtaaatgtttttggcatttatggccatatagcgtcagtcatgactacttaactctgccataagttggtagaaaattcaggcatttaaaaaatctgtttgccataggaaatttgcagaagcccacagcaggcaaatgtctcttgatttataaatgaaattgtataaaatagtagccatagaaagtagacttctgattccaaattatcagcaaagtcatgcagaaaacaggcaactttttaaaaaatataaggttttagtctgtgtaaggtgattataagaggaatattccttctacgggtctgcttagctttctcctaaccactgcttttgatttatccagttcatcatcttttttttaaatagaaaatataatttggcggctgggcacagtggctcacacctgtagtcccagcactttggggggccgaggctggcggatcacgaggtcaggagatcgagaccatcctggctaacacggtgaaaccccatctctactaaaaacacaaaacaacaacaacaacaaaaaaatagccgggcgtggtggtgggcacctgtattcccagctactcgggaggctgaggcaggagaatggcgtgaacctgggaggcggagcttgcagtgagcagagatcgtgccacagcactccagcctgagcgactgaactagactctgtctcaaaaaaaaaaaaaaaaa

SEQ ID NO: 58307 - DNA, 2742 bp, Homo Sapiens
atttacagaccactccctcttcttgttcccctcgactctgagagtgtggtggggtagctgtggaacctgactgcttgcctgaaggttgggcagcgtggctagaaattgcggcccagacctgggatctcacccacacctctatgagacgtcctgaaggaaaccatcgactgagcggagaggcttcgccttgcccgcctcctcccaggaaggaagagcggaagaggcgtcgccagccaccgagactgccagccaccaccccctcccagactctctgtccccaccccagaccagggtcaccttcttcctgcactgggggtggggtgcggtaggtttcgcaatccagactgtggggtgggggtgggagcaggtgtgtgtaaatgagcagctcgtcaggagtcactgagaaggaggcagatggagctggtacccagcaggtctcctctcataagcgtcaaccctcgcctgggcgggctgggggatcctcagcaccccagctctgagccaggggtctgcaacccgggcaccagcgatgggccctcatgcacacagggcgccgagcggggccggaggcaagagtgacttcagacaggaacccgacgccatagccggtgacgcggaccctgggtcagccagcacgatgggccgctggggagaggagggctggaggcagagagtgtaagtgtgcagccttcatcagcttatttttagtcgcgttatgtaagtggcttcatctcaacgtcacatggggggggggtctcagatttaattacaggatgacagcctttgcttttcaagcaagctgttctcctggcaagccaggcgaaggattggggagttttgctaaacagaaggagccctttctgaggtgaccacccgtcaaaacttgaacccgcttccacctccgtctccctcttcccgaccagcctcacccagcctcggctgaatgtggcctgagagtagccacttgtccgcaatcacagggacgttttatgcctgtcaagggagcttcctctctcctcttcctccccctcccaccttctgcctggcagctttgccttctctccaagagaagggtccacccaatcagaactcctcttccttttcattcctggattaaagcacttgtaatcagtaaccagaaagttccagagcgggagagaccggaaggcactggagtgctatcggacgggtgtctggggcagagccaggagggcgagcctcttctctccccgcctgcccttgctcacttccccctccatgccaggtgctgtgggagcagctgggcctggccggggtcggcgggtgaagctatccgcatggtgtctggagcaccgtttctttgcttcctggatgggctggatgggctcccgtgttcttcaccaatggcagcgttaccagcaccaatggcagcgttaccagcaagaaggcaaaggcaggagcacatcgagggtgggagccagggctgtggggtcaggagtcccgctccttgccgcgggaagcctggctcagccacctccagcacacttcggctttgtccagcataaaaggcagagcgacgttttcactgcaggctgtttcccaccagggcaagtgggacagggcgagtgctgacgtctgcaggcatggtgtgcatttaggggtgggcggcaccgagggggcatcatttggcataggcgggcccgggggccactgggctagatgactggctggttgctgggggcaggtgtcacagcctctctgagcaccctctaagtggaggacagaacattgttgggaggagtccaggcataaagtgacataaacagcgcagagaatgggaccagcgcacctgagaggtgatcattagcctcagcaactggatgggacattccgaagagctcccagccaacacagatggtcactccagaggctgacatttaaaaggaaggggcccggccgggcacagtggctcacgcctgtaatcacaacactttgggaggctgaggcgggcagatcaactggggtcaggagttcaaaaccagcctggccaacatggtgaaaccgcatctctgctgaaaatacaaaaaattagccaggcatggtggtgggcacctgtaatcccagctactcaggaggctgaggtaggaggatcgcttgaacccaggaagtagaggttgcagtgagccgagattgtgccattgcactccagcctgggcgacaagcgaaacttcgtctcaaaataaataaaagtaaggggcacagggagggggccccagctcgtgccccttctgtgtgggctgcacatggtgacttccttccagagagcacagagtgggaggtaggcaaggcgtctccacagtggagagcccgacccactgtctcagcccagaggtcaaggctggcaccatcaccgaaaggtcacacgggcagatgtgacagggcgcttcaccactgggctcttcctcccagacccataacccttgtcttagtattagaaaaacactggcagaccgggcgcagtgagctgagatcatgccactgcattctggcctgggcgacagaatgagactctgtctcaaaataaaaaaaaaccaaaaaccaaaaaacaaccaagcaaagtctgagaaactgtcacagcctagaggaacctggagacagctgatccctaaatgtcacgtgggatcctgggtggggtcctgggagagaaagaagacattggagggaaactgaggaaatatgaataaagtatgggctttagttaat

SEQ ID NO: 58308 - DNA, 2462 bp, Homo Sapiens
ctccaagtacagtcacgttggaggttagggcttcaacatatagaatttgaaaggaacacaattcagttcctagaaaatgagagcctagtttttgttttttggttttttttttttttggtttttttaaagattgtgaattattttggatttgttgagtatgagatgaacaatgtacaagttgttgttggagatctaagatggagcatggagaacagattattgatgatagatttacaatccatcaacataaagctcagagctgaggccatggggctggatgagttctctgaggaagaaagcaaaaatcaatacagaggattaagggggcaggaaccaagccatgtgcaaattctcacagaaagtaaaggaggtataaatcagcaaataaacaagttgtcagagagattggaagagaagcaggaaaatgaaacagtgtcaaggaagttaaggaagaaaaggggtgtgaggaagtagtcaataacactaaatgcagttatgaagctcttgtaaaaagttatggtcaaaggccctgaatttgtcaatcaggaaatcattattgactttagaggaagcagtcccggtgaggtgattgggaagagattgaggtaagagaggttagggaaaagcaggatgaaggtgatttcaaagacatgcctggagcataaatggggagccgaatctacagggtaatgaatgcaatcacggaccagtgaagtgtccacatctttgccgagaccacatcaaattcagccctgcttaggtagctacttctttcagatgcctggtttattctttcaacaaaaaatcactgtgttatcaactctgctaagcaatgttatatatactggagattaaacaaaaagtccccgccctcatgtaacatctgtgtttcttctgctccctaccaactgctgttcttctgtgctttcagattgttccttagagagctggtgctcacctgagcccgttcttaacagagccatctttcctaccctgtgtgagcctcatcagagtataccatatgctctttggaagcagggaaagaattggatattttttcactcttactaaagttagaaaatgttggagagtcagttagcttttttatgaaaatgccatctaatcattttttaaattagcacctaatacaataatgatatggccaagtatcaaatgtgttgtcttaactttattataagttttattttattgcaaatataagctctacacataagctgagaatttagtaagcagtgaactctgattcagttagccgggggccaactgtaggcattaacatgttttaaaagcttcctagttgattctactgtgcacccaggattgagataccttgggttagagatctgttgctttgtggtgctgattttatcgaagagcctggttctgaggtgggaacagtaatataaccatcctttgggttgaactgctgtctgctccctgcccttacttttggctgacttattatggtgttctgcccaattctagcttaataaaaatattatgaataatcttaacctcacagtaaagctttttttaatccaatgcaaatataattttacagatgagaaatgattttgcctgcagttatctgcttccaaattagaatgtatttttaatttctgatgagtcacttttcgtgtgtaatactcattttgactggtattaggtggcatgggttggtttttagtcaattccagaatatcttcttacattgttttaatgtaaagaaaatgaaaatttgatgcttctgatctttcctaatacctctatttagagcaagatggagcatctgtctccttggatcctttatatgtctagctacattgtggatgtttgatagaaataataccatgcagtatagtctccgccccgacactgaaaaaaaaaaggagggaaagtatgtagaataaaaagacaaacagtgtaacgagctttattttataacactggaacattgaacttatctgttgaggtggtactaagtaacataacaacttcaaaaacctggacccggcaggcagctaatttagctacttgaaaatcactggggaaaaggaaatagatgctaagattactgaaaccagcttaacacctgccaagttacatcgcttttaaaaaatgctaggaaggcccaggcacggtggctcacacctgtaatcccagcgctttgggaggccaaggtgggcagatcacaaggtcaggagattgagaccatcctggccaacatggtgaaacactgtctatactaaaaataaaaaaatttagccaggcacggtggcatgcgcctgtagtcccagctactcaggaggctgaggcaggagaatcgcttgaacccgggaggcggaggttgcagtgagccgagattgcaccactgcactccagcctgggtgacagagcaagactccgtctcaaaaaaaaaaaaagaaaaaaaaaaaaaaaaa

SEQ ID NO: 58309 - DNA, 2316 bp, Homo Sapiens
gggcacggtggtgggtgcctgtaatcccagctactcgggaggctgaggcaggagaatcgcttgaactcaggagtcggaggttgcagtgggcttagatcgtgccactgcaggccagcctggcaacagagcaagactccatctcaaacaacaacaacaacaacaagaaaacccaattacattcatccattttaagtgtacagttcaatacattttcattaaatctgtatttgtgtaatcagcgtcacaatctagttttagaacaacgccttgaagttctcccatgccacttagcagttgtagtctgctttttaacttaataataacttggggacattattcttttgttcaaaatattcttttacaacatcacttaatgtccttctggtattgttttgtatagctatatcatgctttattggacatttaggtcactttaagtttcatactattaaaaatttaacggctgggtgcagtggctcacacctgtaatcccagcactttgggaggccgaggcaggtggatcacgacgtcaggagttcaagaccatcctggccagcatgatgaaaccccgtttctaccaaaaatacaaaaattagccaggtatggtggtacgcacctgtagtcccaggtactcgggagggtgaggcagaagaatcgcttgaaccctagaggcggaggtttcagtgagccaagatcacgccactgcactccagcctgggcgacagagtgagactctatctcaaaaaaaaaaaaaaaaaagaaagaaaaaaaaattcaacatggtgtacatctttgtaatgaaataattttgtacattcatgattatttctttatgattaatttctagaagaggaattgccgagtcaatggttataattagctccatcactaagctccgtgaggttaagtcattttacttgtttgttaactgttatatgtccaggtcctagaactaggtctggcacacagtatgcaactcagtagataattgatgaatgaatggatgggtgtgtaccctcttgctataccatatttcagcacagagatgccaatttacactgtcatcaacagtgtgtgacaatttaatagaaagaatgtattgctgtacattttagattttccaggacagatcctactaaaaatattctgccctgttatctcactgatgcaaggaaatattccaggaattgtaacattttggcatccaaattatatctcctagattccctgttatacccacagccatatgaaaagtctcttgtcaagtcataaatcttgtttttagctagaaaatatggctgcttatctatctataaggttagttcttctctccaacattgtatctttataaataatagcaggtatatttagactcttttgactattcatggtaacactcacaaaattacctcaaggccatttcaataaacagttttgggggcactatcctcattgctttttcctggcattttataattttacagcagggcgcagtgactcatgcctgttatcccagcactttgggaggctgaggttgacagatcacctgagttcaggagtttgagactagcctgggcaacatggcgaaaccctatctctactaaaaatacaaaaatcagccgggcgtggtggcatgcacctgtaatcccagctacttgggaggctgaggcaggtgaaacgcttgagcccggggaggtggaggttgcagcgaaccgagatcacgttgctgcactgcagcctgggcaacagagtgagactccgtctcaattttttttttttttttttttttttttacattatgaggcattgtccccatcaatattggacatatcttttcctttttctgggtcaaaatttttctagaacagtgatttaaaaaggatttgttctatatgttgagtgtgatggactggtttgcacccacacacctgcaaaccagcctctcggacaacatttacaaatagttgatctcatcccttacattttttttcatcccttacatttttagatcagaattgtcacaggaaataaaacactttgccatcctgacagtagatcagaaggttaatatagatttagtcttggtacatccagatttccggagtccaaaagtggtctgtctctctgtgggcaacccttgagaaccacagaaaaataccccaatgggactgggcacagtagctcatacttgtaataacaacaatttgggaggctgaggtgggaggatcacttcagcccaggagtccgagaccagcctgagcaacatagggagtccgtgtctctacaaaaaaaaaaaaaaaattgaaaaaaaaaaaa

SEQ ID NO: 58310 - DNA, 2186 bp, Homo Sapiens
ttcaggctggagtgcagtcctgcggtcatgactcactgcagccttgacttcctgagctcaagagatcctcccacctcaccctcttaagtggctgggtctacaggtgtgcaccaccacaccgagctaattttgctatttttcatagagacggagtctcactatgttgcccaaggtggtcttgaactccttgggctcaagcgatcctgccccctcagcctcccaaagtgctgggattacaggtgtgagactccacgcccagtcttttcttttttcttttttagagacaaggtcggtctctgtcgcccaggctggcgtgaagtggcgcaaccagctcactgcagccttgacctcctgggctgaagcaatctttctgcctccacctcccgagtggctgggactatagttgtgcaccagcacgcccacctcctgcccagggttgttactggggtggtcacgtgggcagcttctgcctgggatgggccacaaagccagactcccggcagggacacgggtgttccacacaagctgcgttgttggttccctgacgcccttcaggctggggggtgggaaagccgatcccccaagtgcctgcagagcccacctggcgcaggcctcgccgcctcgaggctgctgctcgcacttctgccccttcccccggccaggcccccgttccttgaggccgtaccacaaggtgcgttcatttttccacaccgtgagctgggcttggcagagcctccaccttgtggccagtattcccagtggcccctttgagaggatttcctggagctccctgtctgagcttcccggactgagggcactgggaaggagcctgcggagctggaggtcagcgggtggacgggttgcgctgtcctggctttcggagtgtagagccagaggggatgggacaggtgccctgctgctgggcttggtggtccctgctgcagggaaggggcagctggtgtgaacacaaggagctgcggggctggagaaggccagggccaggagcctgccgacggacaccagcgaggggccaggccgggccaggagcctgccgacggacaccagcgaggggccaggccgggccagactccctggccggctgggatctgacaggagcgccaggctccttgggccgcccgaggaaccgcttgtttgcctgtgctttttcatctgtaaatggaatgagttggacacaagatccaagcgccctcccctgttggagaaggttcttgtgggctctgggcccatcccacatcccacagtgggcaggaggccaccaagaggtgcaagaccatgccctctgtttcgataggaagctgggcctcagaggggcctggggcctgtgtctgagacccggccaagtgctggacgtctccccttcctcatggctgttatggctgaattacgtccccccaaattctcatgttgcagccttaaccccagcacctcagtgtgggactgggtttggagatggagcccctacagaggtcagcaggttaaaagaggccatcagggctctgggtgggccctgatccaagctgcttggtgtccttgtaagaagaagagatgaggacacagacacacacagagggacagccccatgaggaaacagggaggcaatgccgtctgcaagcccagggcagaggcctcaggaaccagccctggtgacacctggaccttggacccccgtgcccaggacagtaggagaattggagccgcctggctgcagtccttcccgatggcaccctgtattagtccgttctcacactgctaattgttgggaaaagggcttgtggaatgcctgtataaactggccatgaaaatatgggacaataagttgtggaaagccacaagaggcctctgaggaggaaagcctcctaattgccatcatgttcgcatgctcagggcgagacctgctgtcttatctgtaaacactgtgttcaaggagaaagacattccttcgaagcactggactgtggacagacacacgagctcctggttaagcccgctcccaccagctcctgtccgataagttaaagatacgctgtttgagcacaaaggagattcattgaaaccgctattgctgtagattacgcctgtgacgcactgcctccctttcactgtttcgccctgaatatctgcttctcagatctaagtgactgtactcaataaatagcgtggagacc

SEQ ID NO: 58311 - DNA, 1933 bp, Homo Sapiens
agaagccacattagggccattaaggctgctagaatttagaaagaaaacacacagcctcccagagtgctgggattacaggcatgagccactgctcccagccttccagaggaattttaagcccatgtccaaacattctgtttgtataaatatattctaatttttaaataaatagtttctacttttctgaactttatattttttcttgctataatggattttcataatcagaaaagattaaattagtaatcatgaattgcctttaatatttggcagtaagtcaatgaaataataaggcacttatataccatctttgacatcattaaaagtatcaaatcccattaatctaaaacttctttaagcattttgaaagcagaaaatgtttacatggttctttcagttcctcaggctttttgtctaatgatgcgtgacttaggataagatttgaattaagtgcccagcttgaaacataataatttttctgtataagccacagatcctctacctcctttgtgttaaagcctttatatgaaacaattaagtagaagcattcaatagtgtgtcattaactgttcatactaataaatggatacagcacattttcatggcctgtaatgtagaacatactatataaagttctcagtttggggatgactaggtttctggaaggaatagaatgctaaatcaatggatggcattgggctgagaaacactgctgctactaatcagccttgaatgtgtaatgtgaacatgcaaaagagaacatgcatacactcaaatttgtacaatgctataactggaagttgaaggacttgaatttttatattgtgctattgttatgttttctgtaattgtttatatctaaggaatttttgaggtaatataaaagaaaaagagaataatgaacaatgatgtcactggagggtttttacattaaattagatcatttttcttcttattcacaataataatcttaatctttaagaattaattataatttaatattataattcataatctttaagaattaataattataatttaatattataattaataatctttaagaattaataatataatttaatattataattaataatctttaagaattaataattacaattaataattaataataatcttaatctttaagaattaataataatccttaatcgcaataataatcgcaaggaggagaagtaagtccctcctccttctgtatgaacttttctcccacatgctgctgtatggtttagtgagagtgaagttctaaagaacatcaatatgattggtgggataatccaaagacattttttcagaatcaaatggcatgtcgaaggtttgtttcttgcatatgtatttactggtccacagcacaaaataaagtgaccacatatacataggaaagttgaatttgtacacatacagcatctgaaatgtatctgatgttcagcatcaagatttcactgaacattgtagaaatgtgtatcttttgcatgtatattttacattgattttctatttatgtacatctagaaagttttaaccctaataaatagttttgtaattttgaataatagtgtcagtttatatgtgagggagtagagacagagaggttagcactggataataattagtaaggccaaaggagaaaatttcatagaaaatattgttgttgtcataatgagtacagcatgaaaggcttcctctacaagacactagtcaaagagttgagagctgcggtttctaatctttgtccattactcccttactccctatgagactgtggacctgtcacttggcctctctggtcttcagttttctcaccagtaaaacaaggaacttgaaccaaatgacctctagtgttccccttgggtttaaatgtctataaatgttcaatgactagaaaaaaaaaaaaaaaaaaaaaaaaaaa

SEQ ID NO: 58312 - DNA, 1863 bp, Homo Sapiens
atttctaattaattcagatggggaagaaaatctctagtgactattattttttaaacctgtacctgtgtgtccctccagtgaaggccatttaaaccccatttttggtgaagtagtttatgattcatttatgtgaaacttttagttactagaaacactacaggtattttgtactcctgtgatttttaaaaaaatgcttctttttttcccctagtctccttatatacatttgacaaagccaaacagtgtattggcacaatgaccatcgagattgatttcctgcagaaaaaaagcattgactccaacccttatgacaccgacaagatggcagcagaatttattcagcaattcaacaaccaggccttctcagtgggacaacaggtagtttttaattttctttcattcctttaactttataggtattctaatttctgcagttttccaaaattaattccaccttttaaaaagtgagaggggctttgcgtatcaactcgtatatccaaggtgagtgataaaagtgagggagatgtatttactgaacttcaaggagtctgttcagaaaaattctaaagtagcttttagattaaaatgtcatgtataattatagcagcttttccctcagcaaatttgggaaccctgtggacatatatatctgaaattcctttttatatcataggacatttgttttgcctctggaatgtctgtctctttcactaatatagttctgtagaaaatgtagctcttggccagacatggtggctcatgcctgtaatcccaacactttgggagactgagttgggaggatcgtttgagcccaggagctcaagatcagcttgggcaacaaagtgagaccctgtctctacaaaaatttttttaaaagtagctgcgtgtagtggtctcaactactcaagaggctgaggtgggaggacggcttgagcctgggaggttgaggctgcagtgagccatgattgtgccacggcactccagcctgggtgacagatcgagattgtctcaaaaaaaaaaaaaaagttcttattttggttatgggcttatttgagaatcttaaaaaactgaattcctgctagataggaaaaggatatagtacattattttaaaaagagtactagaattggaatgaacctcaagagattaccttatgtaactccacatatacaaatgaggaattttatttttttattttttaaaattttatttatttattcatttattttttgagatggtgtgttaccctgtcatccaggctggagtgcagcggcaccatctcagctcactgcaacctccgctttctgggttcaagtgattttcctgcctctgcctcccgagtaactgggataacaggcatgcgccaccacacccgactaattttgtacttttagtagagatggggtttcaccatgttaatcaggctggtctcgaactcatgagctcaggtgatccatccgccttgacctcccaaagtgctgagattacaggcatgagccaccatgcccaaccattttttttttgtatttttagtagagatggggttttgccatgttggccaggctggtcctgacctcaagtgatcctcccacctcatgcctgtaatcccaacactttgggagactgagttgggaggatcgtttgagcccaggagctcaagatcagcttgggcaacaaagtgagaccctgtctctacaaaaatttttttaaaagtagctgcgtgtagtggtctcaactactcaagaggctgaggtgggaggacggcttgagcctgggaggttgaggctgcagtgagccatgattgtgccacggcactccagcctgggtgacagatcgagattgtctcaaaaaaaaaaaaaaaaa

SEQ ID NO: 58313 - DNA, 1248 bp, Homo Sapiens
ggagatgcagggtgggatggagggtggtgatggacagcagagatgaatggttgtgatggatggtggagatggagggtggaaatggtgggtgatggagggtggagatggtgagtggtgatagaaggtggagatgaatggtggcgatggacggtggaaatggaagatggagatggagggtggatggagggtggagatggtgagtggtgatacagggtggagataaatggtggtaatggacagtagagatggacggtggaaatggaggatggtgatggttgtacaacaatgtgaatgcacttgatgtcactcaactgttcacttaaaaatggcaaacatagtagtttttatgttacatatattttactacaataaaaaaagaatgaaaagcctataaaattctgaaaaataaaaaagggggctttagccctgccagagagtagaatccatcatagaacatcttgctatgggcagttgactggacacacacatcagagcaggtctgtgtgatcatttagcatgtgattaatggggcatttaaaatccacgaggggccaggcgcagtggctcacgcccgtaatcccagcactttgggaggccgaggcgggtggatcacctgaggtcagcagttcgagaccagcctaactaacatggggaaaccctgtctctactaaaaatacaaaaaatagctgggcatggtggtgggtggctgtaatcccagctactgaggtggctgaggtgggagaatcacttgaacctggaagcggaggttgcagtgagccaagatcgtgccacttctctccagcctgagcaacaaagcgagactctgtctcaaaaaataaattaattaataaataaataaatccatgaggaaaaggatgtcatttaaaaaagggtgtggccaggcacggtggctcatgcctataaccagcactttggaggccgaggcaggtggatcacctgaggtcaggagtttgagactggcctggccagcatggtgaaactctgtctctactaaaaaaaggacaaaattagctggatgtggtggcgcatgcctgtaatcccagctacttgggaggctgaggcaggagaatcgcttgaacctgggaggcagagattgcagtgagcctagattacgccattgtacttcagtctgggcaacgagcgaaactccatctcaaaaaaaaaataaaaataataataaaataataataaagggtggtggagcgaaaaaaaaaaaaaaaaaaaaaa

SEQ ID NO: 58314 - DNA, 1097 bp, Homo Sapiens
cacttgaggccgaggaactctcaagaacaaaagctacttgcttttcctccttgggcccctccctctccccgtgctcctccgccgtcctcctctaaaactacctgggaggggggagccttccccgtcggctctggaaagactcctgaggaagtcgggccctccttactgtcttgtcttataaaagtctgcaaatcttttcaagttttcttaaaacaagtgcactttcagctccattcctgagcccggggtaagcttggtttgtgataatagtgtgtcctcccagaaagctgagagtgacgccaaaagatctcctaaaatgacttaaaaacaatgagaaggatcgataaggaaaatccactaagtctttttgctcccagtttttaactgttgaattcctgctttgggattgctctttggctggggtagccaaccataccttggatttggtggcttgagtgttcaatgcctgttgcttctcccaaggagatactgattttttttttcttttgttcctggagaccgggtctggctatgttgcccaggctggtctcgaactcctgggctcaagaaatcctctcgccttggcctcccaaagttctgggattacaggcaagagacattgctcccagctcaaaggagaacttctggtcaggaaacttgttgagttaaatttgctttttcctaattgtgcatctcgacttttcccatcaatcttatttctagagtctcttcacaaccggtgtctccctgcctccctgtctcatgatgttaccgagctattcagaaaagaaagtgcagggctgggcgcggtggttcacgcctgtaatcccagcactttgggaggcctaggcgagcagatcatctgaggtcgggagttcgagaccagcctgaccaacatggagaaaccccgtctctcctaaaaacacaaaattagccgggcgtggtggcttttgcctgtaatcccagctattcgggaggctgaggcaagagaatcgcttgaaccctggaggcggaggctgcggtgagccgaggttgcggcattgcactccagcctgggtgacaagagcgaaactctgtctcaaaaaaaaaaaaaaaaa

SEQ ID NO: 58315 - DNA, 1064 bp, Homo Sapiens
gggatctcctgttgagagcttatttccctccccgttcaagaggaaggaacgtgttcagcctccagccagcacggctgactgagtcccctgtcgctgagagcattcaagagggcgaatggccatatgtcagcggtgggaacagaggattccagcactggtgggggttgggggaaaggggcaggcctttgccactcctggtgcctggattagattagaagcttctagggttttgttctgtttgtgagtctaagatttgtgatttaaaactggaaagattctgtggctccttggtcctaacgttcaacggaatgagcctaagtacttgtaaattgtgtgttttacgattctcagatcctgagacagggagattctgttctgtgattcgaagactatcttatgattcctccagtctcttcagcggcagttttgttcctgactgggtcttgggaggagtgcaattgctttgctgaggttgccatgggagcgcgaggctgctgtggccccttttctcatgtatgaaatccaagggctgggccacatggccctggggcccaggtgtgttcagcctgcagcccccttggctccaccagagcctcccacaggccctgtgaggactggctgctccccaccacctcactggacccagatgcttttccagctaagccatgccccttgcctgtctgcccccggccctctcccattcgaacggggaggcaacccagctctccccaaagtccctgtaggaaagctggagcagtgggggagtggtggtggtaagaaataagccgcatgattgacaagagctctacctgcttttgtggtgatgtgcaatttcaccatgaatttcaacattacaacctctcttaattcccaccctctgaggtggttagccccattttattgttgaggaagctgaggctctgagaggttaagtcactcacctataatcatacaggttgttcccaggccctgactctggatcacctgctgtagtacggctctaggccgcctgggcagcatgatgaaactgtctctacaacaaaaatccaaaaaaaaaaaaaaaa

SEQ ID NO: 58316 - DNA, 753 bp, Homo Sapiens
ggctctcagtcccttcctcacgggaggtgcctccccccactgcgatgggggtcctaagagccaggggggatgaggagctggctctcagtcccctcctcgcggggggtgcctcccgcctctgcgatggggctcctaagagccagggggggaagacgggctcgctctcagtcgccgcctcgcggggggtgcctcccgccctgcgatgggggtcccaagagccgggggggaagaggggctggctctctgtactcgcctctcgatgggtgcctccccgcctgcgattggggtcctaagagccagggggtaagagggcctagctctgagtcccttcctctcggcgggtgcctccccaccctgcgatggcggtcccaagtgtcagggggggaagagggggtggctgtcactcctcggctcgtggaggctgtctcccaccactgcgatgggggttctaagagccaggggggaagaggggctggttctcagtccctgcctcagtgggggtgcctccccctctgcgatgggggtcctaagagccagcggaggaagaggggctggctctcagttcccgccttttttttttttctcagtgttttagacgcccagctgcacaacttgattgccttacaaatgacctgcttccaggatgcggaaattcctaatttcttctgtgacccttctcaactcccccatcttgcatgttgtgacaccttcaccaataacataatcatgtatttcaaaaaaaaaaaaaaaaag

SEQ ID NO: 58317 - DNA, 743 bp, Homo Sapiens
gggcaaggttttgccatgttggtcaggctcgtcttgaattcctgacctcaggtgatccacctgccttggcctcccaaagtgccaggattacaggcgtgagccaccacacccggctggaagactgtttctaaagtcagacaaaggatagactaaatgtgttttctgagaaacgttagtctagggaatctgagaggccagaacctctatcatgagtaaaagaatcatggctcatagtctctagttttcatctcatactgttgacttctaatcgagttccttgttttagtaacaaataaaataaatgttttctgctctcaaatctacagggactttattaaaattggaggaacaacatttgacagtcttttgaacgtttagaaaaataggatttattgtggctaagtctaaaaggtctcatgattacaattgactgaaaaggaaggaatgcattgctttccatgcgtggtgacttaattttatgtgcagtactatgcaatacacagagacttacctaactgctgttcttggagggtctattaggcattaaagtgtaagtatccctattgttatttacactaggaaaaaaagcatacctcaggtctttgagaatccaggaaagctttgttttagaatattgctccagcacttgcagtgagccgagatcccgccactgcactccagcctgggcgacagagggagactctgtctcaaaaaaaaaaaaataataaaaaaaaaaaaaaaaa

SEQ ID NO: 58318 - DNA, 708 bp, Homo Sapiens
gtagagatgggggtttcatcctgttggtcaggctggtcttgaactcctgacctcaagtgatctgcctaccttggcctcccaaaaggctgagattacaggcatgagccactgcgccaggccttctttcttttctttttttctttcttttttttttttgagacatcatttagctgtgctgaggggttcttaaataggcagctcagaaaattgttttcctttgtcagccacataaattcagcagaggctcttggagggtccctgctggtgaggggtgaggccagcagtggaactctgatttggtttttgctgagctggtggttgaaaggaatcctactacatcggggttataatagggaagatacattttagaatatgcccagtggagccatcggatgctgcatcgtccccagagagccaagtcatcgtgggccaagctcccatccccatgtctggcctcaactgcaggcccagaatgttgacagctgcctcttggagggttatgggagcctgtgaatgccaacatccccatttgcctgcagcggctgctcccatcctggcttcctggtgggacttttccatgaattggggaatctgctttctgattccaaggcctattaaaatttctgagcattgcccatttcttttgctttatctgtaggacatgggctgtttttaaagaacctcacaaatgaaaaaaaaaaaaaaaaa

SEQ ID NO: 58319 - DNA, 603 bp, Homo Sapiens
agcttcaataccctgtggttgtaaatgggctcttttcttctactgtattttctaattgttcgttcatatatgggacagggttttaaaattttagtctatagcaggtcctcgaaagacgtttcattcaactttgttttgttataatgttgatgagaagaaaaaacaaaaagtctcagctgaggtcactgtctgtgtgaagctggctcattctcccatctttatgggtcttctccaagtactccagtttcctcccatatcccaaagatgcacatgaatggatgtgtctacgcggcccagtctgtgagcgtgggtgtaggtgagagcaccctgtgctgggatggcgtccagttcagggctggttcccaacttggactctgaattgccaagaaaggctccagccattgagaccctgaactggaagagggaggcaaataattatctttttattaatctttcttaaatgtatacacagctcacattcattcaatttttttttgagacagggtcttgctctgtcaccgaggctggagtgcagtggtgtgatcacagctcactgcaacctccacctcggtgacagagcaagaccctgtctcaaaaaaaaaa

SEQ ID NO: 58320 - DNA, 575 bp, Homo Sapiens
cggccgccgccggcacccacagcgccaagagcggcggctccgaggcggctctcaaggagggtggaagcgccgccgcgctgtcctcctcctcctcctcctccgcggcggcagcggcggcatcctcttcctcctcgtcgggcccgggctcggccatggagacggggctgctccccaaccacaaactgaaaaccgttggcgaagcccccgccgcgccgccccaccagcagcaccaccaccaccaccatgcccaccaccaccaccaccatgcccaccacctccaccaccaccacgcactacagcagcagctaaaccagttccagcagcagcagcagcagcagcaacagcagcagcagcagcagcagcaacagcaaacatcccatttccaacaacaacagcttgggcggcgcgggcggcggcgcgcctcagcccggccccgacatggagcagccgcaacatggaggcgccaaggacagtgctgcgggcggccaggccgaccccccgggcccgccgctgctgagcaagccgggcgacgaggacgacgcgccgcccaagatgggggagccggcgggcggccg

SEQ ID NO: 58321 - DNA, 491 bp, Homo Sapiens
gatcgtgccattgcactccagtctaggccacaacagcaaaactccgtctaaaaataaataaataaataaaactgaatgaatataaacagaaaccacagatgctattacatattaaattgataatataaccattacaggcgtgagccaccaagcccggcctaaaacatttaaaaatgtttattttaaacatacataagacatgcacacataaagatacgcatagcatgattgagggcttggtgttttgtttctgtaacactggatttgaaacgaaactataatgagaatgtatagcagggctgggcgaatgacaggcttgcttatgactggagggtcaagggctattgagtgcaaaagctggatgtaatcagattagctcagtgttttgtttttatagctatgcattttagcgtttaaaccatggtaaagaacagcttttaaaaaaaaatcgcttctcagccttttggctaagctcaagtgtaaaaaaaaaa

SEQ ID NO: 58322 - DNA, 429 bp, Homo Sapiens
atgatttaaatcatctgttttttactaatgcatccagaagctttttttgtgtgtgtgggattaggccttatctgcaaataaactttggtagtgatataattataagagaacaataatatatttctgtagtctaccatttagtccatgttttatgcacgtttagaccattgaattaatctctgaaacaatagaaataaattctttactagaaatagcttgcttttgccttggctttgtggcaaagcgacattagggaacatatatggttgttgttgaacctgattgctttagcagcccttgggttgatagtatcaggttccagcctgccctgctaggtcaacgtggacccagggctttaaagagaaaagttcagggaaagttcacttctattgttttaccatggttacaaaacagaaaggaaaaaaaaaa

SEQ ID NO: 58323 - DNA, 346 bp, Homo Sapiens
  misc_feature (333)..(333): n is a, c, g, or t
  misc_feature (340)..(340): n is a, c, g, or t
gaggagttttacattgcagcttagaagcctttcttccaatagcagagatttggtgtcatgtggtgttcatcagtttgaaaagaagtatttctgctgtttgcctcaggatgtacatacagagatgtgctgattctcagaacttctatagaattccattagccagtcctgccaattgaaatttggcatttaattatttgcatttttctattcttgcctaggaaaggagctcgtcacatacctagtttagtgatggaaagtatttggagaaagttttagagagtggggctcaggctcaagaatacaatgaagtaataaagttgttaaccttaaaangaaaaangaaatg

SEQ ID NO: 58324 - DNA, 932 bp, Homo Sapiens
cttccccgcccgggcacgtaacagagctgggagcctggctgccaggggcgtgttatcgcgggggcagcctgggagcgctgctgcgccgcggcaggagaaacagccgaggacaccctggaagagcaggagcacgtgggcctgcgagaatggcgccaacaccagccctgcaaagccacattccaaagccgggccaaggacagccaccgttgccccgcaggcctcaaggatgacggtcaagccagccaaggccgcctccctagccaggaacctcgcaaagcgcaggcgcacctacctgggtggcgcggctgggcggagtcaagagccggaagtcccttgtgccgcagtccttcccgggaaacctggggaccggaactgcccggagttcccgcccccagacagaaccctgggttgctgggcaaccgatgcggcccccgcagctggtctctgtggtgctgggagcgagcccagtatagctcccacctcctgcgctggtaacctcccgtcccgcccgcctcccttgttgtcgcctctcctcgcgtcgcggaatccttgcccttggcactacttacatctctccgggtcccacaacaccttagcgcccacctgcttcaaagccaagctccaccgaaagcgaggcagtcagcccccggacatggcctcagcgctgactgatcgcacctctcgggccccgagcacctacacctacaccagccggccccgagcactgccctgccagcgcagccgttaccgggacagcctgacgcagccgtgagtgaccaagccagcccctgtgtggtccatacttgcaccccatccccaggccggggtctggccccttcgccctggcaaaaaagctgcttatgctgtcttcccttggctgcactctgccgaaataaaagttctgccctaaggaaaaaaaaaaaaaaaaaaaa

SEQ ID NO: 58325 - DNA, 1584 bp, Homo Sapiens
ccacgcgtccgagcgcgtgcagaagcggaggtgctgctcatgggacttgtcggccgccgtagcccctgctaggacagcccgtgcgagcctgctggaggaggaagagaaaggcagagagagtcgggttacaagatggcggatctgtagtagttaccgcggcggcgggagagcaagcgagccctggggggcaaagagacgggagagtgggtgtatgcgcgggtgaagtgagaggtaacggggcctccgggcggagaggcctcagtggctcttgtcaccccttctcgcggctgaacctttggagccatggtgaattcgggcctctccgaagccgccgccgccgccaccgccactactgcctttaccgtctcctaagagtgaggagcgcggacgaggtaagcgaggaggcggcggctagagcggtggagacagcagccaccatgtcggatacgcggcggcgagtgaaggtctataccctgaacgaagaccggcaatgggacgaccgaggcaccgggcacgtctcctccacttacgtggaggagctcaaggggatgtcgctgctggttcgggcagagtccgacggtaaggttatcggaactgtagaataggggatagtgcctctggttggggcacagcttgggtttagggccctgggcccgttaccgttgctactccttcgggacagcgcgttggttctgaactggctcttgtgtacggcaaaaacaaagtactgtacttttgactggacttatcctcagagaccgagactctctgtccttctcccatctctcttaaggattggactccttcctttccagtccctcctcttttgaagaggggagagtgtgagagagaagggaggaagtagtgagagactaggtactgatgtcgccctaggagctgacaccttcctccccctttatttacttatccattatacgtctagtacaaacggtttagggaaacttttctttccgagtgtttttaaaaaaaaaaattgtaccaacgggccccaggtgccacagtcgacaggtgctggggaaaaccgaaaggcacgttttcctggctgtattgctgactgttgccacgatacatggacacacaagcacatacatctgtagtctgcatttcttcgggctgcctttgtagaaggcgctatgagaaagtgaatgccttacaatctaagcaagttgggacaccaaagcgggttgtaaactgctgtattctttggtttattgtagtcatgtgaagtattttaaattacaaaatgtagagccgtaattaaaatgccttttatagtataatctggacttgatttgaacaactgatataggcagttagaaaaataatcttaggtttagtcttgacatattttgtattcttgcttgttcccttttattttaaatagtcatcacttctacagaaggtgttcttttgttcttaatgaggaaaggataaatgcagcactgtaatttctatactaagtatttaatccctgtcatgatgtttttgttttgtaatttgcattatttgttaaactgggaatgcaataaaacaacttttgttaaaacgaaaaaaaaaaaaaaa

SEQ ID NO: 58326 - DNA, 706 bp, Homo Sapiens
ttttttttttttttttttgatttttaatttacactttattctaaaaagtggcccctcttctcttttaacataacttatttaaaaacatttatatttactcagaacttttccaattttgcagtttcacgatcagcctccaaaaagttgtgctagtgtgtgttcagaattcattaaaatctatccagcatttccacttaagtgcttcaatatgtatgaaaaaatgtcatttgaattctctttgatgatcaagttgaacatccttgtctttgtcatcctaaagctgttcttttcagagagccaaatcccatcagattgctccaggtctgtatttgagaaggaaagttagaaccacttcgtctaactgcaacagattctcttctgaatatttaccccaacctattgatgaagtgctcctgtgttctcagtgaactggttttgtttggagctcttgtaataatggtgcatggttcttggaatgatctcaaaatattcccctctttctctttcacactgaagagcaggttcatccccataggatgttaacaagtgtgtttagcttataacccttctagaatcatcgccctcaagtgggcccacaaaaccctcatttgcatcagtgtccacttggttggaattcatgttgtctccttcaggatcttgttgtgaaggtttagttttccctggcatgatctttaaaagatattgt

SEQ ID NO: 58327 - DNA, 1974 bp, Homo Sapiens
agcggcgtaaatattgagttaacctctggaagcaggctttgactttgatattgacctgaccacttaactctctggagactttgacaagtgacatcaatgtctgtctctgtgtttcctgatttatatccacagatagaaagccatctccagatcctagggccattttcaagattcagtgagataaggtgaagcatttgaatgttctccataaatgtcagctgcttttattattactagcattattttttgttttcattattattattaacatagacccgtctaagggcagaaagaaatctgaccaagaatggagtgaaagtcggctgtgaaggttaggactccctgaaaacaaaaaagaaaagtggtaacatcactctgtatccaagggcatggataaggatgattcagaatttttttataacattgatgttaatatacatagagaaatacacacacacacacacgtatatatgtccatggacatcaaaatgaggtataggttaggaagttaccctggaagttagaattgagataattactttgattagcaaaggtttatgttagaaatacgagtggttgaaggcagcgcctttcaccttgatgcctgttgtgtttagcactggatagaaaattgctatttttactgatgactactttaatgcttggttcattcatatgaaataatctttcttttctcctttaataataatgatctctcctgatttcaagttgaaaatgtattaatttaagataacttatgaagcaatgacatatggaagaggagatgggaaattgtttctcaatgggaaagtgtttataaatgggataggtatactaaaggtatttccatttagggaaagaggaaaggaatggtattaatatatttctctaatatttttccccctttgaaagtttgccatgttaggaatcctggggatggagtgatgaattgtggcattgctctgcagttcacgctgctgagagctgccccaacacacacacacacacacacacacacacacacacacaaaggttgcacacacacaaacaggtttgattatgctgatgagacttcttttattattgaaaatatcttaaagttttatctcaccaaggaggccttttctctttccctctctttctagaaggccaatgatgaggccaatcagagtgatacaagtgtctccttgtcagaacccaagagcaaaagcagccttcacttactgtcccatgaaacaaaaattggatcttttctaagcaacagaactttagatggcaaagacaaagctggcctttgtccagatgaagatgatatggaaggagattctttctttgatgatcccattcctaagccagagaaaacttacggtttgaggaaggaacctaggaagcaagcaggaagtctggcctcgctctcggatgcaccccccttaaaaagtggactcagctccctggcgggagccccttctttaaaagactctgagagtaaaaggggaaatacagttttgaaagatctgaaattgatcagtgataaaattggatcacttggattaggaactggagaagatgatgactatgttgatgattttaatagtaccagccatcgctcagagaaaagtgagataagtattggtgaagagatagaagaagacctttctgtggaaatagatgacatcaataccagtgataagacaatcactcagctggaatgtctgctctctattggtgccttgcatttcaaaaacactgcagatattttttaaaagtaattttcattttactaaacaaaatacttcctatttgagcccatgtgtggaagatttaatattcttaatttaactgtacatttctttatggaaattgattatctacactcagtttcattacagggaaggaacccatgaaaacatcagtgttaagagcatgatgaaaggtgtcaataaagccgtaggatcgcacaaaaaaaaaaaaaaa

SEQ ID NO: 58328 - DNA, 445 bp, Homo Sapiens
  misc_feature (406)..(406): n is a, c, g, or t
  misc_feature (408)..(408): n is a, c, g, or t
  misc_feature (413)..(413): n is a, c, g, or t
ttcgagacagagtcttgctcagtcatccaagctggaatgcggtggcactatctggtctcactgcaagccccgcctcccgggttcactccattctcctgcctcaggctcccgagtagctgggactacaggggcccaccaccacatccggctaattttttgtatttttttttagtagagccaccgcacctggcttttttttttttttttaactgagacagggttttgctctgtctctcaggctgaagtacagtggcacaatcctagctcaagcagttagaataggatttttgaacataattaagcacaataaaataggtaaaataaaatacagtattttccttgaatttttatgttaagtatacatatgtatatgtgtgtgtgtatatatatatatttgtgtatttgngntgggnttctttttttagagccagggtctcactttctg

SEQ ID NO: 58329 - DNA, 574 bp, Homo Sapiens
tttttttttttttttttgctaatttttgtgagaagggccccagtgaccctgtagaaggaaatacccacccaaccttggggagggtggagacagcaacagtgggaagggtgagggctgggtggggacagagggtcggcagatgtggctctgttgaagcctgagagatgggtcagggctggagaaggggatcccaaaggagggtcctgatggctgagcaaagtcaggtgaccgcgtgtgtgtgcgtgcaaatcagtgacgagggcaggaaacagacacagaggccaaggaggccgtggctgagaaggcaacaaggagacgccaagaagctgccccatgagaggaaggagtgcaggggacagtggcccccaggagacagcaatgtgacaggtgaggccggggtctaggggagaggacagggcatgcagcgaaggtgcacaggacacctagacctcgcagtcctggagacagaagcctggtggctcacagagaccccccacccggggtccccggacaagtgccccctagtctcgggacaggccaagccaagctaccgaccggagcaagcggccaccca

SEQ ID NO: 58330 - DNA, 1321 bp, Homo Sapiens
atgccaccatgcccaactgatgtttttgtatttttagtagagatggggtttcaccatgttggccagactggtctcgaactcctgacctcaggtgatccactgcctcagcctcccaaagtgctgggattacaggcgtgatcctaagtacagttttataggacaaccatgctcattcatttccgtatcgtccacggctgctctacagcagcagagtttagtggtcaggacagaaccggcacaacctgcacaacctgcacaactttcaaaggctgaatatttactctccggctctttagagaaagtttgcaactcctactttagactgatgcttctccaatgctaacgcgccagtcaccaaatcaccggcatctggtcccagcctccaaccataaaccacagctgaatggaaacttggtagcgcttgccttcaatagcagatgctgtaagaggaaagcaaggtgaccaagaaaacattgcaaaactctgggcagaatctggggcctgaagactctgagtcagaggcctctttttttgctctaaacacatattagcaagagtccaagaggcatcaaagatgagttagcagcaaaatgaggctttgtccttcatgtagaaaggattaaatgatagttgaaaatgcaataactttcaccctgtgggattcagtgatgttcagtgctgtgattatgtccaacttcaaatcttgctgtcccaactgggacagcccaaacatagggagccactgcactaagatgttatgatttattaagataataaagctagcgggatgacaaatgtttcatttttcccccatgtgtttcccccaaaggaccgtctgcttttgcatgtgatttgactatgcgctgaggacctagcgtggtatatcagcaaagtggaaaagtgactgaagtgactgtttatcatcttgtaccaagttacaccactttaagctttaactccacagctcttgcattattttaaaaccgtctggcagatctctaaaactaatggtacaaaccactctgtgatacattaaaatacatcccactctgtcatactgcaaacaagtagctgctccccagtctttgaaaaagtactttcaagataaaatatgtactcatgggttctgcaggtttttaaaaagtcttgaatcttcacagatttactgggggggaaggggcgtttcatgtaaaatgtgtttttccttgacatttagaggtcttgcaaagtggtttattatagatcttgtggacatctcgctatttaattaaatttcagaaatatattctctgcactcataagaaggaaaaaaaaaaaaaaa

SEQ ID NO: 58331 - DNA, 342 bp, Homo Sapiens
tttttttttttttttttgggacagacagggtctcactatgtcacccaggctggtcctgaactcctgggctcagaccatcctcccaccttggcctcccaaaacacagattacaggcatgagcccccatgctcagccattccctcctttttctaatttcttagagatccagacatttcaaaggttttcataattactggggccacattaggctccttaaaacagtatccagtgagacaatgtctgagatgtgtttacgcatgcagccaaaacaagcagcacatagtaggcccttgataacgatgagttgttagaaagtatctcctgtgtgaaattgttatccgc

SEQ ID NO: 58332 - DNA, 1784 bp, Homo Sapiens
agcggctggtctcgaactcctgacctcaagagatccgcccacctgggcctctcaaagtgttgggattacaggcgtgagccactgtgcccgaccttacatattctttaattttgttcttttccttcacagttgaagcaccattggccagtttatgtacaatgaatactactgaggctgacagtttattacttttgttatgtgtaatgatttccaatttgtctaatttggtttatgactttactagtcctttcatttttatatttggcattcattttactaaaacaagagcaccaaccaacaaaataattaaacacatgcagtaatactgcaaaaaggttgtgacagtgccaaaaaacaatggttgtttgtcaaatagcaccaacatatgacaactagaaatgttcttcagtaaattaagtgttaggagatgtgggagtttattaagttgcataaaagtcgaatgtgtgaaagttaagggctacctgaatttagcagggcttttttttttccagtagatatatttagatggtccttgatttatggtcacttaatgggtgattctaagagtggtccttacaatgaactaagctgctcacttccctctcactgagttctctacagattattcctcacctcaacttaaatggtgtttgcctctgctaatttctgagaagttagttaaagttatggtgaaaaatattattttctctccatgacatgtaagaacgtatttattttctgcagcatttcttcgtttatagctgtctgtttgcattctgattgggaacactgggatcattttcatcatgccgacagtggtggtaattgatgtatccctttccatgacccgacctgtgtctattgaggggtccgaggaataccagcgtaagcacctagcagcccatggtttaacgatgctgtttgagcacatggccacaaattacaagcttgaatttacagcacttgtggttttttcatcactttgggagttgatggtccccttcacgagagattataataccctacaggtacaaaatgtagtaagttattgtatgtacagggcctaaatttattgggaggaaaacagtgttataatgcgttgaatatttagaactttggcattatttaataagtctatgagtacttaatatgtgtaactaaacagcaagaattcacaaccagtaggtcttatgcctactgtttcttcggtacagctatgagttacagctgtgagttgttcccttattttcctctcttggttttctggaattctctgtggaaaagtgagcatctcaggatgtagtgttccattccctaaaatttaggatctttaggctcaacacttaatttttttctactctcccataaaacttgaggaaatgaaaaaatagccctttcttattctagagtaattcaaaatgatatttcctttccaacaaatagctttgattttgataccaataaattataatttttaaatctcagttggtagatattatctttcaaaggtgttttctgtgttatgttagaatttactttctgacaacatctctaaatcataatattcataatatttccagcagtgcctaacacagtgtcttacccatagtgagcagtcaagaagtgtttgtgggccgggtgtggtggctcacgcctgtaatcccagcactttgggaggccggggcgagaggatcacttgagcccaggagtttgagaccagcctggacaacatggcaagatcccgtctctatttttaataaaaagaaggaaaaaaaaaaaaaaaa

SEQ ID NO: 58333 - DNA, 2700 bp, Homo Sapiens
gtggacagcatgcccatggcctgctgggtggccagagtccttttgtcctgcggtccatataagagggtctggatctggagacactgtagaacaccaagcagctatcatgaggctatggaagtgtcgctgagagcaggaaactaaggtctcccttgaatgagagaaagatgacctcattcttaggccctgctgtgatggaattagcatgctcctgggatgtctcctagtgactgacctttggtttggatgttctgagggatctaggcaaaagtgaacagttttagcactatttcacaaaactctctgtggctatctgtatgcaaaaaatagatttaaaagtagtatttttaaaaataaaggcaagaaccttggtactgaccagaggatgggctccagtttctatttttaaatgtggcccttgttatagcctggaaaagatttaaaaaaatagttttgttttttttgtaaacacatactctacttttattaatatataggctgtctatactcttgactacacagcaatgtcttagttattaggaaccaaatattcagcttatggactacccagggctggctttggcttgatttctcccttctgcttactttaagtcttgccatttgattgcttgtagtaggctagggcaaatcaaggagaggagaaggattaaagttgtgcccaaaatggccaaaataattttgagaaagaatgaggtggagaggtggaggaacttgctttactgaatgccaaagacccttttatttttttaaataaagtaattaagacagcatgtttgtcacccggggtagacaaaaagaccagtggaacagggcagagagcccaagccttgacagatgacagaaatggccttgcgggattggtgaggaagaggtgggctagtcaataaatgggtactgggaccgctggttttccaaatggaagaaaatggatcactaccccaaatcaaacacaaatattaagctcaagaaagatttgaaggactaagtgtgaaatgcaaaacttggagcttttagatgaaaatactggaaaatatatatatatatattttttgatggagtctcactctgtcgcccagactggagtgcaagtggggtgattttggctcactgcaacctccacctcctgggttcatgtgattttcctgcctcagcctcccgagtagctgagattacaggtgcccgccaccacactcagctaatttttgcatttttagtagagatgaggtttcaccatgttggccaggctggtctcaaactcctgactgcaggtgatccacctgccttggcctcccaaagtgcggggattataggagtgagccaccatgcctgaccggaaaatacgatcttgaggtagggaagtatttcttagacaagatctagacaaagcaaaagtgaaagactgataaaatgtaactgtgaaaacctaaaatatttgtgcaccaaaattcaccataagcaaagtagaaagacaagccacgctgaggaaagattcttgcagtgcacagaaatgagaaaggtttaacattcagaatacatgaagaattcctataaggtaatgagaaataccaaaccaaaccaaaacctctcaatagaataacactcaaaagatataaacagattattcaaagagttgaaatctgatgaaataaacatgcttaatctcattaacaaccagaaatacaaactaaaacctcaatgagggggatctgtgaaaatgtgcagctgttactcagggccattttcatagcagcatcctgcagaagtagattggtggtgtctcccttcctcccttaacctcctgcctaaggtcccagaattgcatcataacatctattgaggaatttcagatgatgaaggtactgatggaacacatcctatttattcatggagacagtgcagcaaggactgcaactagagggtcatttaagttacaaggctacgtgactccataatagaaaattgagaaaagcatactattcatttctggtaaggttccaagccaggctcgtcaagctattacttgtattttgtacttacatgaaatgaaaaagctaaagaaaggtaaattttaaaaaattgctctaatgctgaggatctgaaatcactactcttctttatacacattatccaatgccagattacgtccacgggggagaaattactcagaaacttgaaaattgtgcttctgttttcatgtcaattctcaaggctgatactaagagaaaagatgacttcggaagccttactacgtggaagcgtgaaatgtgataaatctttcaagaaatacaagtacgctttcatttaccaaccattacaaggcaggcagaaatgactaacttgggggaattgaaggaataaaccaaaacgtaattcatcagacaggcttcccctacagaaacacagtcaggggtagtgggtggtttttctgagccacccagataccagcctcatcctggctggacccacgtctttgtccacattcgccacttcctgaagcagctgtctgctgaacaccagcaacacgccaaccctgtgtctacttcggggatggagtggagaatgggcagaagtgagccttgctctcagggggcttctaatggagtagcggagaaagatatttttaaaatacataaataaacgtgtcaacaacttgtaaaaaaaagaaaaaaaaaaaaaaaa

SEQ ID NO: 58334 - DNA, 1432 bp, Homo Sapiens
ggaaaactctgaggacatgaatagtcgccaggcttggcggctcttgctctcccaaggcagaggagatcgttgggtttcaaggccccgcgggcatttctcgccggccctgcggagaggaaataacagtacaacagctaatggctcatttggatgctatcaggaaagacatggtcatcctagagaaaagtgaatttgcaaatctgagagcagagaatgaggtgatacaaattttaatttattacttataaaataactgatctcataataagcatcctacttaaggaataagttaataagaccaagtaataattccatgtggttagtaaacaataagtttttagatttaaaaacacactatttgtttaaccatacctaatctttttctatataaatcatagtgctttgcatactgaagagaataagagttacattttatacatataaaaccacataaaacaaaatctttgagctatatatataaaatttgtatataatggtttcagagctgagagtaatacggcattttctattttatttaatcctgtactaaatgtctttgtgacttaaaagtatatttctgtaattaagtcagaattttaagttatgttatccactatagcttatttttaaatttagaaaatcagtttttaaaagtataatataaaaacaaatgcattttgctcataagaattattttctgaatacagtggcttactagtttcttttgaagatttttttccttatcaattctgtattagaaatccatagattgtccaaattttggtaatctagggtttcagatttttttaatcataatatagacttggtttaatgctaattgcatgtgatctttcctgtacctagaaaatgaaaattgaattagaccaagttaagcaacaactaatgcatgaaaccagtcgaatcagagcagataataaactggatatcaacttagaaaggagcagagtaacagatatgtttacagatcaagaaaagcaacttatggaaacaactacagaatttacaaaaaaggtaaagtaatatgtaaaaatgtctcttttgtacagttcttgtgccttgtataactgcttttatgtgtaccagtttataagtttagacttttaaaaactacccttgtagagtctctggcttcctcatagctattatagttaaccagcacttttggggaacctggcaccaggcagatggtcgcccatgagccatgaccttgaagtaagaatcaagatttccacatagtgtgcttttttaaactaaattacttctataatagaaaataactatttttgggccaggcacattagctcacacctgttaatcctgcactttgggaggctgaggcaggagttcaagaccagtctgggcaacatagcaagaccctgtctccaaaaaaaaaaaaaaaaaaaaaaaaaaa

SEQ ID NO: 58335 - DNA, 387 bp, Homo Sapiens
tttttcaagtaattttatggtataatatcaaagcttgatatagttaatacatttcatctaatataggaatgagaatgcttataaagcagacgtcattttatgtaccattacaaatacactgccaattaaacagactttctcaacaaaagactgttgttgacgaggtcacttccattagacacacaaaatggtttgtttttgttttcatttgtttttgttttttgagacaaggtctcgctctgtcgcccaggctaaatgcagtggcctgagaatgataatgtgcctgcttgtccatttcctgtgttgtttccactgcgttaacaaaagagccttaaaacacaaagcactggccgggcccagtggctcacgcctgtaattccagcactt

SEQ ID NO: 58336 - DNA, 985 bp, Homo Sapiens
ggggacagggatagcggcagagccggtagcggacggtccttgcattggcctccggcaggcgccccccgggggcgggaagctgcctcacagcatggaaccacaggttactctaaatgtgacttttaaaaatgaaattcaaagctttctggtttctgatccagaaaatacaacttgggctgatatcgaagctatggtgagtgttactttattttgtttctccttggtttaagcatggttattttttccaaaggtagctatttttagcagtgttgtttcatagctgtgaagtctgtcatagttaccatttctgggccttttggaaaattgcttttgatagggtttcagtattcatatatgagatgtgccccagtaaagggaaccaacacataaatttccttttgaacattttagaaagggaaggtaaaattgtttttagtgagataggatttagaaaacctattaattttagaaccagtatgaggagtgaattggtgtgggctccacccaaccagatcccaaggaaatgttctcttgtgtgaggatatgacttgtgttttgcacaaggatataacttgtgttttgcaagagcctatcaattgtttttattgctaggtcagaggttgagtatctcagagttgagcaggaaaaactttcatacctgcttagacagcagttcacctgttccgtttttttgctaaggcttttcctcctcttggtttgccctttgtactcttctgtttttgttcagtttgcagtggtgaatgttttacttcctgtgttgactgtgtttctctctgaaaccctttggtaaaaatctacgtttacctggttatatctgatgataactaaaaagggaaagaaatggtagatcttaaaagatgatctgaggtagttgtctgccttccagcaaatacctgttcatactgtcctatcagtgacagtgagacccgtctcaaaaaaaaaaaaaaaaaaaaaaaaaaaaaaa

SEQ ID NO: 58337 - DNA, 2066 bp, Homo Sapiens
agcggctttgggaagctccgggcgcccaggcttgggcttcgtcgtggagcgtttgcgcggccagcttggggaagggtcgtttcaaggttgggcttggaggagagggcagtagccgagtcccctctgccctaaagaacgagaagaatcgtgttctatgcctggaggacagaggcagcccgtgcgggtcggacagcccactctgttctgccagtacttcgggaggttctggggtgcatagtgcacttttcccaacctgccctcagcttctggaggcagagagcagggccaggctgctgtcatgccgtttcacgatctgtttaatttttgacctacagtgccaggtttgggggcccgcctcgtgggtgggcatttcggtagtcattcagccatttgagcaccagctacgtgtcggacacaatattaaacgatggaagtacaaggaaataaaacagctcctgaccaggagcctggttgggggacaggcaggaaaacagtttggaaagtgatctaatagaaagaatggattttggactactaatcattccctaaggcctagaagtaggatcgaacctatcattttgaaaagtgtttggcgaatgagtatatattcatatgcccaaaaccatagttttgtttttcttcttattccctaattggaattgttcccaaggttgctatgtggaactgtttatccatctgtccctaggagaagtggttaggataattcttaacactaataaatgaacattctgctgcttactgaaataagatctcttagtgagatcagtctccaggctttaccttggagagacctgttttgtatttcctactttaagttggaagcctgtactttggcaaaattagtaacaataattgttttattgtacagttatgactaaatagaattataaatttataacagaaacaagggcttgatacgtggttattcacaaagtagcagagaaaatattttaactggagatttaaacttcatggaatttagggtagcaaaggaaatcctcacctctcgaatctagctaattctcaaggttggtttgcctaccagtgtgtcccagggaaggctgtctgcaaaagattgtaaagaaatttcccattgatgaaaaacctacaggatctttgcagaattcctaaatgatggattgctgagttgattcaggtcaagtgttttacttattatctgaccttagactatgggattgcctttttttttttttttttttttgagatggggtctcgccctgttgccaggctgggatgcactggcttactgcaccctccgcctcccgggttcacgccattcgcctgcctcagcctccagagtggctgggactgcaggcgcccgccaccacgcctggctaatttttgtattttggtagagacaggtttcaccgtgtggccaggctggttttgaactcctgacctccagtgatctgccctcctcggcctcctagagtgctgggattacagtcgtgagccactgctcctagtgcgagtatctttcaaatctagacccaacggtatggcagacagtaaagaatcttatatttctttttcatgttgttattccagcacacattattagagtctaggatgaacagtttcaggtagtaggatgataatgttgtatctcatttttgtggccttcctcactgttttaataatcatgttagtgaccatttattgagtctcagcacagtgctaaatgctctccatatgtggtatcattcaatcctttcactttttatggatgagaagactgaggtttagagacctaccacattggtaggttaatgatacattcatcaaaagtaacaaccttgttaggaggagttgtttacagaggatatactagtactctttcagttttaactaaagcttccatttactgatagctcaattttgtgccattgcaagtaaaaacaaattgatggctgacacctgtggtcccagcgctttgggagttcgaggcgggaagatcacctgagcccaggagaccaacttgggcaacatggcaagaccctgtctctaccaaaaaaaaaaaaaaa

SEQ ID NO: 58338 - DNA, 3703 bp, Homo Sapiens
agcggctgggattatagtcgtgagtcactgtgctcatccctattactatcttaataattcatgttagaaaggagatattaatggctgctttgcaaattatttatgaaatgttatctttttattaatttgtttacttacaaactactaaacaaaaagcactttttcccatcagtatttagagtcataatctatcttgctaaatgtcagacgtatatatttaaatatcacatcctccgtttcatttactatgtgactaataaaaacttaatagacactaattgttgtcaaatttgccaagaaaagactctcacaaatcttgttagtttttaacattctgttcattttggagcatataatgtatccccagcagggactgtgcttagaagcaccagggacttcttggaagaaaatatagttggcagatcttgggtcaaccagaatcatcccttgcacagattgattctggacatactgtaggtaatagccatatttttatactgtcagaatttatgtcgctttgtgatccaattgttctagacattttgtctatcaaattatggccatctacagagaggaatacagtaacagcttgatttctcacgttagaccaatagcacaaaaaagctcattccaacttttccatttttttctgtgaaggtttgggaaatttgctggtaaacctcatctagtgaccataatggtggatatattagcctatcaggaaaaatagttttattattttcttaatttagagctctcctctctcctcctgcccacacacctcccacgccccactctggcccccaccatgctcatgtgtgagttttctctcctggaaaaatgaatatacagacaataagaagttagggcaaaattacggagaaaatagtattggttatataatccttgaataccataataatgttgagcaaaaagaatccatgtatttaaccgatacagataacaggcacatatattgatgtagatatctgtatctatatatacctatctatacatattcatacacatgttggaggaaataagattattcagtcaaatttatataacaaaagggctaatttattactcttctttaaaatttgaacgttacttaaaatttttttaagtaagtaaaattcaagtagtaattcctttaatttcattttactatctgttcttcatttttgctctatttctttcctttactatcatacttattttagtatttctatgtgtcttcactcattcacatcagatttccctctcatgatacacctttatagaaacattcctttttcttgtttttgtttttgttttattttgtttttggagacagggtcttgctctgttgcccaggctggagtgcagtggtgccagtggtgtgatcatggctcattgcagcctcgacctcctgagctcaaatgattctcccatctcagcctccaaagtagctgggactacagacacacgccaccacacccagctatttatttatttatgtatacatacaaacatacacacatacatgcatacatgcatacatacatacatacatacatacatacatacatacatacatacatacatttcatagggagggagtttctttatgttgcctaggctggtctcagtattcctggactcaagtgatcctcctgccttggcctcccaaaatgctgggattacaggtgtgagacactccagccagccagaaacattttttcatatctatgtcttctcaaattttctgtcactacacttttctttatgtaatatcttaaaataatgtttttttcaaaagattcctgaaaaagtctttctcattttggatcccatgtgactttggcacaatggaggagtatgttggggatggtaagggaaaggttactgaatctggaccacagaggtatctgggagaaatagtggcatgttgacagtctgagatgaagtcatgatgacagttttgagtcctatctccttttacagcattgacttgctttgctgctccaacagaaaaaataaacattgcttcttggggctaaatccatttgtgtattctcgaactagatgaaaggtatataccaaaatgtctagtttttttctttgcttttaatattaatactccgatttaccaaagttctgttctttaatatggcttatttgttgtatttaaaaataagtaatttggaatatggctttatgtcactgtgaagtcagcttattaaagctgaaattgtgtgtttcattgattatctatctcatatgtttattattctgaacagtgtcaactgtctgagatctgtagcctatagaccagagtgtaggttttaacaaattaagagtattaaacgctcagtcactgcttctatctggtacaaggatgaagtaaatttttgaggaactgtctcaatcttctgagtagagttaattgtcaatatactcattgataagaaggggacagagaagaccagaaggagaagtcacatactataattattttgtcatccttcttttttctttcacatattccactatagagtggttgagtagaggcaatgccagcatagagtcttgtcttttgtcatgcatgctttatggctatgacatagagccatctcaccaaattttcagtggaacttaaaattcactttggctttgggaagctcattactattaaaagaagtttccctttcttttttggtgtttaaaagttactgtgttataaaaaatggacctcaaagaagaaattaaaatgaacctcaaagaagaaaataaatatatttgaatggtcatctatacatgcattcttcagagtgctagaagcaattatttcttgacaatgtacaaaacgattattgaacagagagcgagaactcatgaaaaaaagttttctgaaaagtagatgatgcatttatggaataaaaaaagattaaacatctggtgatcattattattttagaaattcacattagaaaagagagttattaatggctactttgcaaattatgtatgaaaccttgtctttttaatagtttgtttacttacataatttgactttgaaataatataagtaagtatgatcaagttgataaactgattagggaagcaatctttttttgtggcacattagtttctgtgcagatttactaaagtaattttctacctgaggaaaataaggagaaaaatctagcttttaaaaatatatcattgttaactaaagatgctattaagggtgttgccagaccaacttcctttaagggtgttgccagaccaaagctcctcaaaacatatttagaagctactgacctgtagatttttaggaattttattagggaaggcatttcttttctttaataagccccaaccaatactgatctgggtttctgagggctgtcaatttcttatttttgtttttgctactgatgatgatgaaagatgtatgagggtacagaaaatgcaatttttggaaagctgcatagtataagatttcatattgcttctttcttttcagagctaaagatattctgacaagagatacctggaaattatcaaaaaatagtattaaaaccaggttaaagtcgttatcagaattatagatttggctaggaagtattcttttcatgtgacaatttggtctatataatttgtgttcttttcagtactcgtactgcataattatgtataaagaaaaaaaaaaaaaaaa

SEQ ID NO: 58339 - DNA, 2546 bp, Homo Sapiens
ggccaccaagaggcaacgggcggcaggttgcagtggaggggcctccgctcccctcggtggtgtgtgggtcctgggggtgcctgccggcccggccgaggaggcccacgcccaccatggtcccctgctggaaccatggcaacatcacccgctccaaggcggaggagctgctttccaggacaggcaaggacgggagcttcctcgtgcgtgccagcgagtccatctcccgggcatacgcgctctgcgtgctgtatcggaattgcgtttacacttacagaattctgcccaatgaagatgataaattcactgttcaggcatccgaaggcgtctccatgaggttcttcaccaagctggaccagctcatcgagttttacaagaaggaaaacatggggctggtgacccatctgcaataccctgtgccgctggaggaagaggacacaggcgacgaccctgaggaggacacagtagaaagtgtcgtgtctccacccgagctgcccccaagaaacatcccgctgactgccagctcctgtgaggccaaggaggttcctttttcaaacgagaatccccgagcgaccgagaccagccggccgagcctctccgagacattgttccagcgactgcaaagcatggacaccagtgggcttccagaagagcatcttaaggccatccaagattatttaagcactcagctcgcccaggactctgaatttgtgaagacagggtccagcagtcttcctcacctgaagaaactgaccacactgctctgcaaggagctctatggagaagtcatccggaccctcccatccctggagtctctgcagaggttatttgaccagcagctctccccgggcctccgtccacgtcctcaggtaaagggtcttggggttgaaaaggtgagattaataccccagggaggaggattgagttagccagtcctgagggctcaggaggaagaggggagcactgcccattgtgtgttcactgggcaacagcaagcaggtacgcatgggttgggggtgggagcctcagcccctgccctttccaggaagccatctcccactgccagattttgatttgaggaataaagatttcaaattatgcactcatcagcaaaacttatttgtgccaaataagggggtaagcagggcctgttcccatcatttcttatcagaaactgaaaggaaagaaaaagaggagatgcctaaactcttgatcctgcctcttgtcccaggaggagcaggatgaaggtgccccccaacccccgcacctgctcatggcctggcaggaggccaaggtcgtgttgcccattaagcaaatgtctgtgtaacaaaaggtgtcatcaataaagttttaacaagttttttaaaaaagcaaaagctgtatctcagaagaaaatacctgcaacaaagcttagggacaaaggattacagacgaagtattcatgtttatattattatttttatttgagacatggtcttgctttgtcgcccaggctggcgtgcagtggcacaatcacagctcactgcatcctcaaacatcggggctcaagcgatccaccccacctgagcctcccatgtattaaaactgcaatacttttgcaccagctaatagctggggattacaggtgcatgccaccatgccagtctccttttaaaattttttgtagagacagatctcactgtgttgcccaggttggtttcaaacttctggccatcttcctgccccagccttctgaagtgctgggattgcaggtgggagccaccatgcctggccatttttaaaaaaattcctacaaataattaagtaaaaacaatccagtttttagaatgcggaaaggctataaacaaggcggttcactgaagagggacagggaatagccagtatagatatgaaaaggcgttcaacctcaccttgttagtaactgggaaatgacatttgacactaggcagcctcttcttgcctattagatggacaaagagttgatgctcaagttgatggttgagtcaggacttggctaggatgtggggtggaggaggtgctcacaggggctcactcctctgctgttgggaatggaaatgggttttctgaatggcagtttggccatttgtatgcaaatgtgaactgcgggcatccctcaagcccgcagttccatatgttggcagcttcttagggactacaagtacacaaagagtaacagaaaaaaacattgaaaatcacataaacaggccaggcatggtggttcacgcctgtaatcccagtactttgggaggccgaagcgggtggatcacctgaggtcgggaattcgagaccaacctgaccaacatggtgaaacgctgtctctaccaaaaatacaaaaattagccaggtgtggtggcgggcgcctgtgatcccagctactcgggaggctgaggcaggagcattgcttgaacccgggaggtggacattgcagtgagccgagatggcgccactgcactccagcctgggtgacagagtgagactccatctccatctaaaataaaaaaaaaaaaaaaaaaaaaaaaaaaaaaaaa

SEQ ID NO: 58340 - DNA, 650 bp, Homo Sapiens
aatggtgttagaatatattcctttctaatctgttttctatgcatgcacaaacacatatgtgagcacatatttataattttattctaaaaaataggatactgctgtacatattgttttacaatctaagtcatataattataatattctttaagcatatttatgagtaaaatattaaaacctatacaaaaaaataatagaatggcattttagctcattcattgatttttataaaactatttaacacactccctggtttgtacgttagcgttcaactaaatgctaaaaatttatcttcaccatcatcattaatttatttattaatcattattaaattcattcatctgatcattttcttgacggactttactattgccagacactgtgctacaagctgggaatgctgacagctataagcataaacgagggaaatgatggcgggatgggtcactgtacaacgggagaactttcatttttacttcatatatatctaagcagtcataataggttgatttcttgtaattctaaaaaatgtaaaaatgcatacatgcactagtgcatgaatggcagccaggatgagtggaatcggagcaagcatcacacacacagcgacttccgtgtccgatcttgaacgaatgagcgaaccaggccgg

SEQ ID NO: 58341 - DNA, 1024 bp, Homo Sapiens
agcgagtgttatttaattttgttcactgtgtttacagtgcagttttagtcacctgaaattctaagagaaaagatcaatatggttttgccaatgaaaggtcattaatacttggaatgaaagataacttctcctggtgatgaacacatgccttttgaaaagcatcagtatctccttaaaatgtataaactactgtaatcaatgaggaagactttttcttatcagatttattaaactcatttaccatacaaatagcattataacattaaagaaaattttcttaaaaattctgtaccataaaacaattactggttccttcctacctgtttttaggtttgcagatgaactaatgtgtggatttttggcagacacactgctgaacaatttttcacctttgttgggtgagcatctcaccctatctccatttgtctccctgctcgtgagttctagagaagaccaccaataagcaagtgaaattctttggccaagtcactgatatcagaattccccagaggcaccaagaactttgatttccagaaatcgttctaggcacagccactcattcaaccttatattttgtatctcagagttaagcgttgcctttgggcctacctagcctgtagactctattttaagaacagcaggcatttaatagtcgtcggtcagatctgatagagcttctaagccaatttctctaaccaatctatctcgactagataagcgcattcactgcttcccacaaaattttttaattcattacttccaaccaatccaggttatcactatgaagctacccctactcttccggaccatggagcaataatccatccatataccaagtacaagattagatctatcaacaatgagaaaaaaatactctcaacgtgggtgtcaccacaggatagggtcgagagagcgacaaacatcgggaccgagcgcacccccaacaccaccgaaaaccaacacacgacacggcccagagcgccaaaacgagggaccaagcggcaaagcacgcaccagggcagat

SEQ ID NO: 58342 - DNA, 2169 bp, Homo Sapiens
ctgttaactgttgatatttctttacacagaggcccccccagtgcccttcctgcatgcccagcggtacgtgagtggctatgggctgcagaagggggagctgagcacactgctgtacaacacccacccataccgggccttcccggtgctgctgctggacaccgtaccctggtatctgcggctgtatgtgcacaccctcaccatcacctccaagggcaaggagaacaaaccaagtgaggacctgagtcctgaaccaggcccccagcccgccctctcatgtcctctccaggtcccccaaactctcatttcccagggtagttcctgaagtacctctgaaaagctacacaggcataaagagtaaggaatagtttctcaaaactggaacgggagcctcactgtgccaggttcagaagtaatttataaaacagcaataattaaaacacataatactggtgattcttaataggactgtacaaggacagtagcttcctttttcacttacttttgcctcctttctggagcattgggttttgtgatgattcatagactctttaaggtagggaaagggtttggcaacgttaggcttttgaagctaggaagatagcagagctggagtagatggtgttttgcttccttgggaggggtaaagaggtacagttaattaaatttttttatttctatttttattaaaatttatttttattttctattatttttctaaggagaagataatattagtgcttcctattaggtgccaggcatagcactaaagcacttgcctttctttggtgtagggggagactagtagtaaagtaaaagacctctgaggaagaggttgtaccatatcccaaacggccaaacttaaaaacctttcagtactttagttgattcctatattttcaaacatacggtgaatagtttcacttattttcagcaccattatttgtaccaccttcaaaatctctatttcagacatcctaactgcatattctataggtttttctgttattattcttttaaatcttctcctttggaaaatttcaaacccaaacccaaacagaatagtgtaataatcccctgtacacaccctgcagccttttttttttttttttaagagacagactgttgctctgtcagctatgccggagtgcagtggcatgatcatggctcattgcagtctcagactgctcggctcaagcgatcctcctacctccgcttccctaggactgcaggcatgaaccgccatgcctttaattttttcacagaggcagggtcttgttatgttgcacaggctggtctcaaactcctggcctcaagcgattctcctgcctcagtctcctaaagtgctgggattataggtgtaagccgctgcctgctggcatatcttaaagcaaatcttagacattgcatcaattaacctttaaatactttaaggatttttaaaaatgtaaccatatcattaccacttctgttttcccctgtggtcttaaaaatgtctttttataattggtttgtttaaattgggataaacaaggttctcacattgcatttgctttatactaagttcctctcttgggtgggcacagtggtgcacacctgtaatctcagcactttgggaggccaacacagaaggaccacttgagtccaggagttcgaaaccagcctggacaacattgtgaggctccccctacctatacaaaaaaattttttttttttttttttttttttttttttgagacggatcctcactctgtcacccaggctggagtgcagtggcgcgatcttagctcactgcaacctccacctcccgggttcaagcgattctcctgcctccacctcccgagtagctgggactacaggcgcgtgccaccacgcctggctaattttttctgtttttagtagagatgcggtttcactgtgttagccaggatggtctcgatcttctgaccttgtgatctgcccgccttggcctcccaaagtgctgggattaaaataaattgtttttaattagctgggggtggtgttgcacgcctgtagtcccagctactcaagaggctgaggtgggaggatcgcttgaacccaggaggtcaaggctatagtgagccatgatcatactattgcacttcagcatgggcgacagtgtgagaccctgtcacgaaaaaaaaaaaaaaa

SEQ ID NO: 58343 - DNA, 926 bp, Homo Sapiens
cagtatcagctgagctgaccttactctgaggactaactcttttgctggaagcggtttctgatttacagctcttggtttctcccagacatgttggtgggagagattttggtttttaaggggttgttagatggagtaaattttcttttttttttttttttttttaactaaaaaggggtcacagaatttcagcagttctctgatttttawattttattcctcttcctatccaatccctgccttttgagtccaggtggtaagtacattttctttaacgtttttcctgcttttcttcccaaatgtgtctttttctttgggctactgtaccctgcttccagtgctgtccccggcataggtccatctctgcagaagccatttcaggagtacctggaggctcaacggcagaagcttcaccacaaaarcgaaatgggcacaccacaggtaaractttaatccggtttcttctcccctctgggaagtttcgggctgaaattacattcacagctctcactcacatttttaggcaaataagtgaagttggtttgccagtgttccttgacagaagttgagcgtctgtgtatgctctactgggaaawttgtctttgtcttagactagaaagtgtaacttctgtacatcttctcctaaaaacaagggtagagccaatggaaagtaatggttctgttacatagaatgagttgttgccttgatcttaaatgatgtattggtagatatacttcccaagtggattaaaaagttaaaacttacagcataacaaagtattagacttactgaggtgacttgaatatctccttttgattttcactctatttttcttttcaccatgggaaaatgataatwttttaataaaccaaggctcttaccatagctgaactttaaaacttagactgtcttttctgtaaacgattct

SEQ ID NO: 58344 - DNA, 387 bp, Homo Sapiens
ttttttttttttttttttttttttttttttttttttttttaaaagatacaaaaatattttcatttaataaacgtctttgcatgtcacatttaatgggaaacaaaatatcatgttaatagcctagtaatacaattttattaaagtcagtataagttgaaaagtttatcagtgttaataagaatgaaaaatatgtacaatatgcaattactattaaatacaatttgcccatagttgcacattgaattcattatcacggcagttaaatatcagagcttctggtttctcactcttcattcatgtattcagcaaccatgtgctaaggtactaggacaagcactggaattacaagataaagatgatatggtccacccctcaacaactgtttgc

SEQ ID NO: 58345 - DNA, 1774 bp, Homo Sapiens
cccaggtcgaggagaaggaagggggtgcctgcaaaacctcgaggagacggccctggcttgagggtcctccagcctcctccacattgtcttggaccccaggagccgggaggagctgcacccatatctccataggtcatcagggagaaaagaggcggggtcctcctgtttcccaaaatacaaacagcctttccctctgattgggaaagcagtgtataagccatccgtcggtttggtttttcttaaatcttggaatggcacccatgaggaggtggaaagtatcctgatcaatctgcgccgtcactgtggggcggcccctgcagtgtgccctgtgagcacacacactggcgcttgttcagacacaattgggggtaaactccatgccacttcgtttacttcctcctcttgttccataaccatgtacccctcatgggcctcggcatcggtggataccaggtcatgctgttacatagctacaagaatttgaaaatgagttaaacttttctctgtgtttcattataagactgataagttcttattgtttttaacatgtaaacaccagtgacagtcaggagtcccttttcccttcctctccaaccgtgctctcttctgagcctctgccagcccatctgccttcgcacatgtatgtactgagattaacacagatgcggcgtggcctagcatgtgcctcttccaccaagcagtgggtgtcaaccgccgagtgcacatcggaagctacccagccatctaatcggccaccaggcgtcccggcagatggccacccctggacgtctgctctcaaactctggttggcaggcatccgtcttttctgttgatcagcctggtcaccaacccagcagggtccctctttctctcagagtgcttgtgcaaacaccctaggtctgcgcagccctcagacatggggtcgctccaccccagacattgtcctcttcgtgttctggttgctactgccaaagtggtttcactcctacgctggggtgtgaatgtaccctgcccttccctgcagcgtgagggcagcagcgttctcagtgtgtaaattgtcgcttgtctgatgggtgaatgccgtggtggtcactggtggccccttttacgatcaggctggggtgtagcttctgcccagaccctggtgaccagccagtttcttaggaggtggttgagttgtgtgtccccgttggcaggccggcagcaggcggaagctgcacctcagggctgggggcgcgttggggagggctggccctgccaggaagtgtgctgacagggcaggagggctgagcggcagacacaaggcactcctggtccccaccagctgtggcctctgccaccccatgggtgccagtcttaagtttcagagcatcactggtactcaccctggtcctgcagctcctgggcccagagacaggatttcgtgttagcctcctcgtactgtgctggggtgatgataaaactaacaacccaggctggacgcagtggctcacacccgaaatcccaacattttgggaggccgaggtgggtggatcaactgaggtcaggagttcgagaccagcctggccaacatggcgaaaccctgtctctactaaaaatacaaaaattagccaggcatggtggtgcatgcctgtagccccagctactcaggaagctgaggcagaaaaatcgcttgaacttcgggaggcagaggttgcagtgagctgagatcgcaccactgcactccagcctgggcgacagagcgagactttgtctcaaaaaaaaaaaaaaaaaa

SEQ ID NO: 58346 - DNA, 1249 bp, Homo Sapiens
actaaaatttccttaaatgtctgcagagaaaagagaaaatggtcatgtctcagtaaatctgtgatagatgctacagggaaagctgctcctgcccagaaggctgaaaccaaggaagtgtctgctccagaccagcccaaacacacaatcccaaattttggtaaaagttcctatcagccctgtgtacagccagctgtgccaagaacatagtatgctattcccaaagctgagttgggatgaggaatgagggatagtggctggtttgtactattcacttatgaatgatcaccagcgtctccctggattgctcctgtatttgttttaggtgtacagtcaggttctagagatccaaagtagttggtttcaatcattttttcccactcaatggttgcttgggtggaagtacttatacctagaacttcttgccacaccatttcgcctaaagtctctgtcttcatctgtattttttcttttttaaaaatttgttatttcatctgttttttttatgtcagatttacaaggatcttgtaactttaaaattataaaaataaatgttcggtattcttgtaatttatttttacattaaattttttattaaataatttttaaatttaagactttatcttgtattaacgtttatgtatgatgaggggtaggtggctccccaaatttttatttttatgttggaatttctttcggtgtgagacaagaattcaaagtaatatttctcagttgcttcccagttgttttatactacttttctgaaaaatttatataccctattgaaatttcattgtatactaaattccttgatatattgggtctgtttcagactttttttgtctgtttggtccgtcttttcttattccctacctcactgttttatttattgtagcttcataatatgctagtttcttctgttactcatctctttttagaattttcctgttcttggctgggcgtcatggctcacgcttacaatcccagcactttgggacgccaaggcaggcagatcacttgaggtcaggagttggagaccagcctggccaacatggtgaaaccctgtctctactaaaaatacaaaaagttagctgggcatggtggcaggcgcctgtaatcctagctacttgggaggcggagggacaagaatcacttgaacccaggaggtgaagtttgcagtgagccaagattgtgtcactgcactccagcctgggtgacagagcgagactccatctcaaaaaaaaaaaaaaaa

SEQ ID NO: 58347 - DNA, 3531 bp, Homo Sapiens
agcggagtcgcctcgcagcagcgagccgcgagcgcccttctccagtcccggcttggaactgaactgtgtgagcacgggtcctggaacccgggcccagaaccggcgagcccaggtctgagcccagagctcagcggtcagcctcgtaggccctgactcggaatcgagccgaggcgctgaggttggagccggagagcgtgagagccgaagagcagggagggcgggccggctgcgcgtccgacgagtcgcagagcaggaccgcggaaggcagggagacggccgcaagcccagggcagagggcagagggcagagagcggcctggctcggcggagagggcgccgcccggccggaaccaagctcgccgcccgggacggcgggccccgtggggcgcggacccagggtggccgtgggtccgcagcgactccccggccgacggcggggggcgtgccccctcccagcccagcctccccaacccggcccgcccgccgcgtcgcgggggcatgtgagcgggaagcctaggctgccagccgcgaggaccgcacggaggaggagcaggagcgcggagccgcgagccccgagccccgagcccggcgcctggctgagtagatgtccatgaggagccccatctctgcccagctggccctggatggcgttggcaccatggtgaactgcaccatcaagtcagaggagaagaaagagccttgccacgaggccccccagggctcagccactgccgctgaacctcagcctggagacccagcccgggcctcccaggatagtgctgacccccgagctccagcccaggggaatttcaggggctcctgggactgtagctctccagagggtaatgggtccccagaacccaagagaccaggagtgtcggaggctgcctctggaagccaggagaagctggacttcaaccgaaatttgaaagaagtggtgccagccatagagaagctgttgtccagtgactggaaggagaggtttctaggaaggaactctatggaagccaaagatgtcaaagggacccaagagagcctagcagagaaggagctccagcttctggtcatgattcaccagctgtccaccctgcgggaccagctcctgacagcccactcggagcagaagaacatggctgccatgctgtttgagaagcagcagcagcagatggagcttgcccggcagcagcaggagcagattgcaaagcagcagcagcagctgattcagcagcagcataagatcaacctccttcagcagcagatccagcaggttaacatgccttatgtcatgatcccagccttccccccaagccaccaacctctgcctgtcacccctgactcccagctggccttacccattcagcccattccctgcaaaccaggtgagtgtgagaagggaggttccaccactgcggccagcctgtcctgaggtcagggaaagcgccctggagccactctcatccattaatttgctatgtggactttctgggcatcagttttggatctgtctggtagaagaatcatcctctttttctgaatcttgctgaatttctctgaacttcactgggagaatgaaaaaccataaagccctttccagatgtaaaatgatgtagcaatccaggtctagtctctccaactctagtacatttactgtgtcagagtattaatatctggaatattgccaggtgtggtggctcacgcgtgtaatcccagcactttgggaggccgaggtgggtggatcacttgaggtcaggaattcgaggccagcctggccaacatggtgaaaccccgtctttgctgaaagtgcagaaattagctgggtgtggtggtgcatgcctgtagtcccagctgctcggaagactgaggcgggagagtcgcttgaacctgggaggtggaggttgcagtgagctgagatcatgccactgcgctccagcctgggtgacagagcgagactccatttcaaaaaaaaaaaaaaaatctggaatattaactgggttttacaaatctcccaaattcttttttgtttgtttgtgttttgtgttttgagacagagtcttacttgttctgtcacctgggctctggagtgcagtggtgtaatctcagctcactgctgcagcctccacctcccatgttcaagcgattctcctgcctcagcctcctgagtagctggaattgcaggtgcacaccaccatacctggctgatttttgtatttttagtggagacggagtttcgccgcgttgcccaggctggtctcctgaccgcaggtgatcctcccgcctcggcctcccaaaatgctgggattacaggcgtgagccaacatctcccaaattctaacagccacgattcctaccttcacactcttgtccctgcctacaccatgtcactctggccttctaccccatcactgaaattcagcagaatggccatgtgtcagacaagggtgtgggacctgacggtacagggcagttggggagggagcatggagtctgggatttattttgtaggctgtggggtgcatgtgaacatttgagaagtgagtgtgtcgttctggctttgaagggtggggagtggaggggagactggccagaagcaggacctgctaggtgattctagcagcaggggatgatacctgaactagggcagtgacagagagttatggggacagggcagagatgctgcccataattaccccaggagtgtggacagctttaaaggcaacacgtgctagatcatcctccctgttccacaggcgagaaagagagagagaagaggaaattccctgaggcctataggccatgggcttgggtagactgctcagccccactggctctctgctcctgcctggtttgtgccgggcactgtagggtggtgtgaaggggaaacacaaaggactgagaaagccaggccccatcttcatccattcaggggctgtagaaagacaccatggaccgtgtggctcataaacaacagatgttattcctcacatacagttctgggggctgtgaattccaagatcataaagccagcatatttggtgtctggtgagggctgactttctggttcacagatggcgtctctcactgtgtcctcaggtggtgaaaggggtaaacgggctccctcaggcctctaatctcattcctgagggctccaccctcatgacccaggcacctcccaaaggtcccacctcctaagtctatcacattgggaattagatttcaacataggaattggggtgggggaggcacattcagaccatagcattctgccccagactctccccagttcattttcttgtcatatgcaaaatatattcattccatcccaataggctcccaaatcttaacttgttccagcatcagttcaaaagtttcaagtccagagcctcatctaatctcacctaggccaggcacagtggtcatgtctgtgatcccagcactttgggaggctgaggcaggaggattgcttgaggccgggagttcaggaccggcctgggcaacaaagtgagaccctgtctctacaaaaaaaaaaaaaaaa

SEQ ID NO: 58348 - DNA, 1400 bp, Homo Sapiens; identical to SEQ ID NO: 26107

SEQ ID NO: 58349 - DNA, 1894 bp, Homo Sapiens
tgggggctgtgcttggcgcgtaccgtgcggtccctgtagttggaggacgggcggtcgcgcggcctttcccactagccggaggtcggagataagtacccgccgcccggctcctctcgggaaagcggggtggtcctcgaaccttcagcgagggtggggagttgcccaggtcagcagggatctgcgtgggttgggggggctggcgaaggccgtctgagctccagtccggcagcgcggcagaaaccagcggggcactgtcatgggcctggggaggagcggcctgcggagggcgccggggcagtgtgtctgtggtccagaaaacctgctccgtccggagccttcctggccccgctaccagcgtctccacatcccctagaaaagaaaagacgggtgtgggccttaggttacagcgcgccgccagcgtttggttgcatggcgccgggggagggcgccctaaccgagaagctgcttaatacaaagagctccaggctcctggcggttcaccaggtctaaacagccgggctttatttgtgggggcgattgaaaaaattgagggtcaagattggggtgctgtgcaaataaatgcgttaatactgttctttttcttctttctttgcagtagcctctagttcgttagtcaaaacgtgaaaaaaaagacctgctttgccctgggaaatagtaaccctgccaaatacatcagcttgtaggagacagaggtaaactacaataattttcctgtgttatctttttttttttaaacacccaatttcaataggccctagaaccttccaaaatggaactgtgtgtagaatacgtatgttcccatccactttcattggtggtctttgttctttgcatattttgttaaaacttagaaaaacagaattcacgtttagcaattatttatgtggtatttatcttaaatatagccaaacattcatattacaaaggaagaaaggggcttccacacttttttcctacttttttttcccttctcctatgcttagtgaattgtcaggctgctagggcttgtagaacagggcttgagttttctagagacctttatataataggcactttaaaagcagaatttcatttacataggcactccttctagtagaacttgatggagctgttaaccggctatacttccttcttgcacaatgggagcgtccctatccctccctaaaaatacgttttttttcctttctcccagctggcttactaaacctccctgggaagtcctttcctaaaaccgggctgttctgttcattctatacatttatgataggttatctggccttaattctgtcacagcttttgttcagatatgctcattttcatgacactgctttgtacctgataccttatgtaatatttgttttgccttgccttgaaatcacagttcaagtttagaaccttttcttgcttgatacactgatgctccaaaataacaccttaaatgtgtagagtttgccatatgtaattaaaccttatttatgtttgtatagtttcgtagtttatggaattctcacacatcacacaggagttgagaaattacttttaggcagctagaaagggtaaaagagttctcggtggaattttcctttaataaaaagcagctcctggccggtgactttgggaggctgaggtgggtggatcacttgaggtcaggagttcaagaccagcctgaccaatatggtgaaatcccatctttactaacaatacaaaaattagctgggcgtgggggtgcgtgcacctgtaatcccagctactcgggaggctgaggcagaagaaccacttgaaccgggacgcagaggttgcagtgagccaagatcgcgccactgcactccagactgggcaacagagcgagactctaccaaaaaaaaaaaaaaaa

SEQ ID NO: 58350 - DNA, 448 bp, Homo Sapiens
ttttttttttttttttttttttttttttttgttctcctaaaaaagagtttattcaggaacagcaaggggattgcagtcaggatatgcgtgctacactggaaggcattttggggggtgttcgcgacaaaggcaacactttaaaaggcaaagaagtccatgtaagctgctctagaacgaagttcacaggtcacagcagctcctggcaggaggcagtactgttcaccgcaggagtggccgtcactgggcgggcgccctcgtcgcagtcccgagggttctggggtgagttctgctacaggcaggtcttcgagagcttcttcacggcctcccctgactcattttgtaccagcagcttccacactcctatgatgatgatttacctgtgaatttcgggttttctgtcatcatatcatttacagatagtaacagctgaatgtcttctttacaatcg

SEQ ID NO: 58351 - DNA, 1458 bp, Homo Sapiens
atctggaaggcatgtttgcaatataatgtggcttgtaggatctctcctacttttttacgctctgttttgccagttctcaaaagtaaatacctgaagtcctagaggtactataaacattttggtaaacattctttgagactttttctcatgtacatgtaaatatacatcatcccaagttaaatttgataggccttcctgacagtagccatatagataaatagaagttttcgttggtttagtggcaaaactgaattcttaatgtaggtatacaagtttaatatgatggttagaaatgaagttttctgaaagtagttcgttgtatgctccctaaaagaattagctttatatttatcttaagaatatctctaaacctatgcaaaaatatggcaaatagtcttctttccattagtctagttcaacaaaatctgactcagagacagtaaagaaagggcaagtagaagatctaatgccaactaagaagataattatttctgaaatatttagttgaagataactttctttcttaagacattactgttgttatgatgcacaagtcaaagaacatgtggcatttccaaagagtattaaatgcatgttacttttttataaaaataagataaatgagattaatggggcttggaactgcaatcttggtaaataaagttactgtatgtctttcacgagtgtgtgacatgaggattgaatagacagaattgcttgttagaaagaggaactaatttttgtatctattacaaattatatttgtaattcttccctaattataaattatcatgattatttttatttgggaaataccaaaaaatcataaataactaatctaaacttacagaatcctatcatccaaaaatggccattaatgacagtttgatagatttattgcagtttttttgtatccatttatctttcttgttcattttttcttctttcctaacaaattgaagtaatgccataaattctgtttcatactttgctttatgtacccttacagcatgaacatttttcatatctttattgcccaaacataattttaatgtatattaaatagttcatcatttgaatgatctatactttatatactttatatttctcaaaataattaaattgtccaaattttggcacatttagattattcaaatttttgaacgtagggaactcactgataaatataattatacataaaccctagaccacatctctcgtgatattattagtatagattcctagaagtagagttgctatgtcaaaagtatgaagatttattttctattttcatctttaatcggattttcattataaaaaaacaaggccaggtgtggtggcttatgcctgtaatcccaacactttgggaggctgaggcaggaggatcacctgaacccaggagtttgagaacagcccacgcgacatggcaaagccttatttctataaaaaaaaaaaaaa

SEQ ID NO: 58352 - DNA, 2152 bp, Homo Sapiens
acagtctcaaagatttgtcagtatactttaaaacaatcctgggaacagttctagattgaaggagactaaagaatcatgtactaagtgtaatgtctgatgtttgattggattgtgaattttttaagccatgttatgattgggacaattgtgaaaatgtgtatacggaccgcatagtagacaatgataatatgaagttccattgagtgatgatagtcctctggttatgtcagagaatgccttggttcttaggggctgcacactgaagtcttcaatggtgaagggtcattatgtctgcaactgactctcaaatggttttgtccagaaaatgtatagacatacacacacggaaagctaatgtggcaaagtattagcaactactgattccagatgaaagttatacaggtgttcattataccatttgaaaatgtttcccagccatcctaaggcttaaaggaaaaaaagaaaatgtttaaaataaaaacttgggggcagaaaaagaataccaaaaattttgggctcatgcctgtaatcccagcactttgggaggccaaagagagagggttgcttgtgcccaggagttcgagaccagcctggacaacatggtgaaaccccatttctacaaaatatacaaattagccaggtgtggtggcacacacctgtagttctaggtactcaggaggctgaggtgggaggatcacttgagcacaggagacagaggctgcagtgagccaagattgcaccactgcactcagcctgtgtaacagagcgagacccggcctcaaaataaacaaaagaaacacctttgtggcagaggtaaggttgctatacaacaaaatgctgggttacggttccgggtccattccatatgaagatcagaggcttccactggacccaaaggaatactactagtcacttgtgattgttcctttataggtttgaaagatgtctcaggccaacttattggatgcagttttaatctaaaactctatacattgtacccccaactcacagacttcttgtatccatgaaaccctcttctgttttcatagtcttaatatggccccaataaagccatccttctggaggactcagaaaaggccccccacaacctctgcaacacaataattatagttaactcttattgagcactgactgtgcaccaggcatttttcaggtattgattcatttgatcctcaaaattcattagaggtaggtactattataatgacaaggccaaggaacagagattaaacaatttgcccaaattcacattattatcagagctgagattgaagcatagtctggctatggaatctgtattcttaatgaccatgctatactgcctaagattaaccttttacttcagttacagggattgtttttatctctctgaaagtgcccccaataagccacaacaataaattaatcaattgtctcggtcacctcttttgcccaaatttacgtattggaaaaaattcaaacaagccagaaagatgaaagaatagtacagaatccaatcaaagatcaggcactgcatgtcatgtcttcatttcctttaatctaaaacatgcctctactttctttgatctttcatgacactggcatttttttaagagtcaaagatagttgtcttgtaaattgtcccacaatccagatttgtctgtttcctcatgatgaaattcaagttaagcatttttgggaaaaatactgcataggtgatgtatccttcctgcctcgtaaccgcagatggcctgtaatactaagtttgatcacttgactaaggtgatcttccaggtctctccattgtaattattttgctggctacagtggctcccacttgtaatcccagcactttggaaggccgaggtgggaggattgcttgagcccaggagttctacaccagcctgagcaacatggggaaactctgtcactactgaaaatacaaaagtacaaaaaaaaaaaaaaaattagctgggcatggtggtgcaagcctatactcccagctactcaggaggctgaatttggaggatcccttgagcccaggggggttgaggctgcattgaggtataattttgccactgtatttcagcctgggtgacaaaataaaaataaaaataaaaataaaaaaaaaaaaaaaaaaaaaaaaaaaaaa

SEQ ID NO: 58353 - DNA, 1841 bp, Homo Sapiens; identical to SEQ ID NO: 23504

SEQ ID NO: 58354 - DNA, 568 bp, Homo Sapiens
ggccgggggattttacctggttctaaaaataattttcattacagaaattttggaaaatacatcagtaaatagagtagataataaaaatcacctgcaggcctactttccagaagtaactcttgttattaacattttggtttactttttcccagtccgtctatgtgtctattacagggaaagaatcccttatccaaaatgctggggaccaaaagtgttttggatttcggatttttcttttttggattttggaatactcataaatatataataagataatttgaggatctgacaagaaattcacttatgtttcatatacaccttagacatgtagcttcttcaagctacgcttgatttaattgttcccttttgatattcagtttatttccagtttgatgctgcaatacccctgtgctgaacgtctctggcacattcatcttggttgcaattgtactttaggctatatttctaagagcgaaatgaccacagccaaaggtatgaacattgttcaggctttcaataaagactgccagatatttacaaagattgtgccaatctctgtttttccctg

SEQ ID NO: 58355 - DNA, 301 bp, Homo Sapiens
gatgcagtatctccttaggacattcttttagaaagaaatatgcatttatatcataggcatagatcaacacttcctcaaaagcaatgtagacaacattagtatctcatgtcacatttcctcaccctgcttttatgacaagttaggatagagaaaccatcagttccttaaagggatttggatatatttttttaggaaagcagaaaggataagaaatttagaggagtaaggatgagtggcacaaggaaaaaaaaaaagaaaaaaaggaagaaaagtttgtggaaagaggaaggtaagtagataa

SEQ ID NO: 58356 - DNA, 584 bp, Homo Sapiens
  misc_feature (448)..(448): n is a, c, g, or t
  misc_feature (460)..(460): n is a, c, g, or t
gaaagaagttaagttgataatatttgaaaatggtgaccaaaactcctatgtaacttgtagcaaatttttcatctttgtgtctttggaatttagaaaaatatttaatttctcttaagtcttataaagtttactcaaatataattatgttaaaatgtactcttgcatgttaaattgtcttttttccaactatgataaaacattttttctcttgattttgttctctatcacataaaattactgtgacatgaacatgtaattgggagtatttcagctgttgcctatgcgttcagtaacacttgatgttattgtgtgttaaattacatgccttttggcctcttaaatcaaaggtagcattttcagagtatctttaaaatgttttaaatatattttatttaagaaaagattatcaggctgggctcggtggctcatgcttgtaatctgagcactntgggaggccgangcgggtggatcacctgagggcaggagttcaagatcagcctgaccaacatggtgaaaccccatatctactaaaaacacaaaaattagctgggcttggtggcaagtgcctataattccagctactc

SEQ ID NO: 58357 - DNA, 1630 bp, Homo Sapiens
gggtgcccctttcattttgggcctctgacaatgcttcagaagttgtagtccaagcacacacgaatagtgccaggagtcgagtttccaataacttctggctaaaagcctcagagtcagtcagcctttcccagtttctcatgcaaaacgtttaaaattaacaaaagccacctcaaactacaattttcagaatctgggaactcttatatccaagagcaagatggatacacttggattgaaaaatgcagccaagacccacaaatgccaagtccttgccacagaacaagctgtccagctggaagaaactagaggaatccccaaaccatttgtcctctgactcaagaacaccagaattataccaagacaaaactgtgcagctatcactgttctgcacaggtgtaccgccttgtgaagtgatccgggagacttctgtgttaccaaaccctcctcacatacactcactcccactaaaacatctccttctatacaaattagaaactgaggctcccagaaaacaacttgaaaggaatgtagagaaacttatgattgtcagatttagcaaataaaaatacaaggatgcccagttgaacttgaatttcatacaaactacaagtaatttttaatataagtatgtcccaagtcttaaaagaggactacaaataatttgttagtgtgagtgtgcccgtaagtatttgggacatactcacactaacaaattatttgtcatttatctgagattcaaacttaactgggcattctatacttaacttggcaatttgaggaagggtgaaaaaagagaatacattattacattgcatcatggagatacagaccttaaaaataaaaatgttgtaggctgaggccaagacacagaagcctttgcagcagtgctaattgggcattataagtttatatttattaactcttttcagaaatcataatcttgaaggaaaatatcccaaatcatctcaatacagacaatatccgtacaaggatactacttgacatattcaatcaaaacaatatgaattcttacaaactaagaattggactagaatttagaatgtatgctcattggccttttagctatttatagctggagtcccacagataccaaatgtcatgaatggaaatccacatgcccatcattgacaatctaaacagaacttgtttgattaagaataaaggaggaggaaaacaacaaaggaaactatatttcagaatatgggaacgtgattactatcccaagaatataaaaaagtatttttatactatctgacataatcaaaagaatatgaattacatgaaacaagagccagaaggtacaaggatgaattaagaagcttgttaggcgagttaaagacatttcaagaaattgaaaatataggagtattagagtctttattgaaatcagtgaaggaattgacaatgtctgtcatcgaattagagtttaaatatcagatgctgtctcagaactcataagaaaaatcaatgataaagagatgatagctctaaaatggtaaaaaaaaaaaaataaagtacacgaattaatttaaaaaggaaaaaaaggtttgcataagatttgccttctgcaacaataaattccaaaaaaaaaaaaaaaaaaaaaaaaaaa

SEQ ID NO: 58358 - DNA, 2556 bp, Homo Sapiens
ggcggggaggaggaggagaaggcggcggcggaccgagctgcgctctgtcagtaccatttgagccattcgcttcctgacaaggcccgtggcgaggggagaggagctgaaggggccgtgggggatcagtttcatttgaaacctacggggaaccaagcactgtcgctgccctccaggaattcatactctactgctaaaaatcgtcatcatcattatcctcttaataagaaaagcagtccccattatttgttgctttctgcgtgttctgcactacgttaattgccctacatgcattagctcattgaattcttacaacattcctttgagacggataccgtgatcatccctcttttacagaggacgaaacaggtgtggggatggtaactggcttgccaagaacttgcagctagtacgcatctgaataagaaatcttcccctttaccgcttttacaagaagtttgcgtctttggcggaactgatgggcaaagaaacactaggttctgcaaaaaaaaaagcaggatctgttctgtgttacttttaccactcttttcagtgacatgtctggcagagcacgggtaaggagcagataggaccatgagtctatggggtttgcaaagaggctcatttgcacaagggtcagtggttctctgtggtataaatggagaagacggcatgtctgaacctgctgtagctgacaaattattactggaagtggaccagtgatgcctgatggcaagatatagagcagtagatttgtggctggggtagccttgtagtcagggctcccttaaaataaaaccttgctgacagtggtaattgtagtgtgaaaggcatagtgtcctcttgcttaatcatgggatacagactgctcacttcttaaatggttacctttgcagtttaagaggtaccagtttctctgggactagagccatggtgaaatttccattctctaaattccactcttccttgctagcttcggtgtatagtccgccttctttttttcttctggtttacattattgtttgagcttattattatttttattcatttattcaatacttttatcaagtgcctgctgtgtgctgatactgttctgtgtaatggggattcagtgaacaagactgaaaaggtacctgtacttatggcgcttacattttggtggaggaagacagacaaaaatcaaggaaataaacacgataatttcagatagtggtaagtgctatgaaaattgggaaacagcagggtaatgtgatagtgatagaggcagagttcatttagatggggtcatcagggatgccttctctgaggaggggatatccaagccgagactgaagaataagaaggatccagtcatgctctaaggatcatctagtaatttgtataatctccatattagcactcatatttgaatgagtaatgcgttgtcatatgctgtgttgtgctgtaataataatatagtactatacatctgcaagatataggacatatatgtactatttaagggatgtgaataactttctgaaacaatgaggcatagctctatgatgttgaaagaaaaataaaactatggccataaaagtattatatttccttaataatttccctcacttctaaaattgaatttcatgctttgcttgagtatccatagaagatatattactttatttgtataatctatttacattctgtgtattgctgaatgcatggcatgattaaaaaaataaaatatttgagcagaaatggggttaagaaataatgtgagttgaaacctagacctaaaaaaaggctatgccttaaggtgttttattgtttttacttttgcttttttaaaataaataaaagcttgtaaaatagtctcactcacactgtagagaaccatttgtttgtcattagattcctactttgcatagattgaacacaaataattacaattgattgaatagtaggaagaagttttgttattgattaaactatttagaaaaaatagcattatatcttatttttttataacctgattataattttgactattttttttttcccatttctcattgcactataatttgtccctgatactttggtgtactgaatttttaagtactttgaggcctaccgaggacatatcctatttcatctttgcatatcccacatcatgaattgaatttccctgccctctctttttttgttaagaagctaattattttaaaatgaagacataaaggaacatgattgtattctattttctgtttccatagttcatacccttgctggttatgattctgataatgtctttttattttcccttgcttatttaaaggaaacagtgccacacataatgctgtgcaaataagcaatcaacatttactgtttgctaaatgaatgaatatgatgcctaatccctcctggttaccttgtattttcataatcacaatttcccagaaactgtgaaattactgggattgttttaagtagtttggtgatggttccaattttcaacaataaaatataattaatatcagaaaaaaaaaaaaaaaaaaaaaaaaaaaaaaaaaaaaaaaa

SEQ ID NO: 58359 - DNA, 1591 bp, Homo Sapiens
gtcacccgctcggaggccgtgggcgccttgacgagggcgcggcggcgggaatgcacaacgttatgctcatcacctgcgtccaccactgtcacccctgacggcgagacgcgaggtgctaagggcttgtccaggctaagcgggttctctgcgtccttaagcccactttgcagatgctaatcagaggggacaggcggccaagaacctggagcccacccgggcgtctgtgcccagtgccgaccgtctaaattcccttcccacgtggctcctgttgcgtctgggctgtggaggattcctctaaacaggcacagccaccctctggaggtcggatccgcagctgcttgcccggttctactatgccgacgaggagctgaaccaggtggccgcggagctggacagcctggatgggcggaaggacccccagcggtgcacgctgctggtcagccagttccgctcctgtcaggacaatgtgttgaacatcattaaccagatcatggatgagtgcatcccccaggaccgcgcccccagagatttctgcgtcaagttccctgaggagatccggcacgacaacctggccggccagctgtggttcggtgccgagtgcctggccgccggctccatcatcatgaaccgggagctggagagcatggccatgcgcccgctggccaaggagctgacgcgcagcctggaggacgtgcggggcgccctccgtgaccaggcgctgcgggacctgaacacctacacagagaagatgagggaagcgctgaggcacttcgacgtcctgttcgcggagtttgagctcagctacgtctcggccatggtgcctgtgaagtcccccagggagtactacgtgcagcaggaggtcatcgtgctcttctgcgagacggtggagagggccctggacttcgggtacctgactcaggacatgattgatgactacgagccggccctcatgttcagcatccccaggctggccatcgtgtgaaatggaaaaggtgttctaaaattcatgtggaactgcaatgggccctaaatagccaaaacaatattgaaaaacaaaaacaaaattggaagattcatacgtcctgatttcaaaacttactacaagtcaaaaccttatggtactggcataaagatagatgtatagaccaatggaataaaattgagaagccataaataaacccaaacatctatggtgaactgattattgacaagggggccaagatcattcaataaggaaagaacagtctcttcagtgaatgttcctggagcaactggataaccacatgcaaaagaacaaagttggaaaaaaaaaaaaaaaaagaacaaagttggaccctgcgatggttaacttcatgtgtcatcttgggtaggccacattacccagatatttggtaaaataccagtctgaatgttgctgtgaaggtatttttttttctttttataatgataaactggcaatttataattgcgcagatttatagcatgcaaagttgtgttataatctatgaatgcagtgtggaataattaaatcaagctggttaacataaaaaaaaaaaaaaaaaaaaaaaaaaaaaaaaaaaaaaaaaaaaaa

SEQ ID NO: 58360 - DNA, 1320 bp, Homo Sapiens
gtcggtaccatggcgacgcgcggtggggctggggtggcaatggcggtttggtccctcttatccgcccgggccgtgaccgcgttccttctgttgttcctccctcgcttcttacaggcccagaccttctctttccctttccagcagccggagaagtgcgacaacaaccagtactttgatatctccgccctctcgtgtgttccttgtggagctaaccagaggcaagatgcccgaggaacttcatgtgtatgtctaccaggatttcagatgatctctaataatggaggacctgctattatttgtaaaaagtgcccagaaaacatgaaaggtgttacagaagatggctggaactgcatttcttgccctagtgacttaactgccgaaggaaaatgtcactgtcccattggccatattttaggtaagaattagattccttataaagaagtagtgataaatcttcattcttgtttttgtttttatttgaaaagggcactaatttaaatagttaagtgattacttaatatttttgcagtggctcaagcaattctcctgcctcagcttcctgagtagctgggactgcacacataacaccactgcagctggctaatttttaaattttttgtagagactgggtctcgttatgttgctcagcctggtcttgaactcctggcctcgagagatcttcctgcctcagcctcctaaagtgctgggattataggcatcagtcactgtgtccagcccttaatagtgtttataaaaattatttttgtacaaattaatgatacttaaaacatcagcaggcattgagaagaaaatacaaagttttgtctgagttttttaaaactcttaatattgtaggattagatggttatttccttaacataacatgacaaaatatgtctcaactcaaaagccaacttgatacttaatagggaaaaagcgtaagcattcctgttaatgtcaggacctggaaaaggatgcaaactatgcacttaagtaagagaaaaaaaatatttatcattggaaaagaaaaggtaggccgttgttaatcctagcactttggaaggctaaggcaggtgtattgcttgagctcaagagtttgagaccagtctgggcaacatggtgaaaccgcatctctacaaataaaaaaaaaaaattatttggttacggtggcatgcacctgtagtcccagctactcgagaggcaaaggtgggaagatcgcttgagcctggaaggtcaaggctacagtgagctgagatggcgccactgcactccagcctgagcgacagggtaagaccctgtctcacgaaaaaaaaaaaaaaa

SEQ ID NO: 58361 - DNA, 3766 bp, Homo Sapiens
taatttgataccacgtactttaactcatatttttagtattgagtgccggattacacatattaggtattccttgatttctctccatcatttggcactttgaccactgtccttgagactctcacttcccttgccttatttctatattgtgacaataaactctggtagttttttcatacacctctagctgtttcttcataatctccttttccgtgccttaaatactgatgttctctagcagtccatgtttttctgttcttctcattctctttcacctgtgtagttgcttctgttgtaagtggtgaacttttatccaaactgctgacgtcaaatatgtaccctcagctcaaaccactctctgagatgcacactcctgaccatcttcatggcatattccaccagcaccctcaattcatgatgtccccagctgagttctgatattctgtctccaagtcaccattccagtccttctccttccatcctgaagcagcctagagggagagacagggaaggaaaattaagtttcagcacaaggttgagaagggtcttgagacagatgggcttgtggagcaataagtgggctctcatccagccctcaagggaaggaatgtaggaatcagtcccaaaaagtgatgcttgagcagaattcttggagcatgtgtaggaattttctgggcagaatgagaggagctgcacagtgtcctttaacctcaaggatctttttctctgtactgagtcttcagctcatttgatttaagatgaaaaccacccttcctgatgttattcataccctgtaaagaaatctacagacttcctcaaaagaacaaatcattgtacattaatgggagctggggcttcccagcatgcaaagggtcatctagaacctgcagatggccctagtgtagtccgtgggccatctgcagctatcttctggggcacttgagagccattgggccccaggccccactccagacctacagagcagaatcatttgaggagcctagcttgtggtgccccaggaggaccacaaaatgatgcagacttcacttgcatatggtgaaccttaccagtaaggtccctatatatcttgttcatttaagtttggtatcttcagttcttttcactgttcctgcacatcacttagtgcacagtcttcagcaggctgatgactgagaacttgcgtttatgtgctttggtaccatcacactattgattgacagtgaacatcctgtcattaagcccacgtatttctgatacatatcgtacattctttagctgtggtgcaggcatcctatttagttactgaagcagttagcttcttgtactccagagtgccacatagacattttacttactgaaaatatttggaaataatttcaaattacagatgttctttgacttaatgatgctgttatatctggataagcctattgtaagtcaaaaatattgtaagtcaaaaagcatttaataccctgttaaacccaatgtaaagtagaaaaattgtaatttgaaccactgtagtggggtatggtctgtataagaaagttgcaaaaataagaatagtacaaagaacttatgtgttctttacttagattgacctgttgttaacattttacatcatttccctttttttaaatttttttttcattaggggcggggtctgtctttgtcccccaggccagagtgcagtggtgcagtggcacagtggtgcgatcttggctcactgcagcctctgccttccaggctcatgagatcctcccaccctggcctcctgagtggctgggacagcaggtgtgtaccactacatctgcctaaatttttttgtatcttttgtagagactgagttttgccatggtgcccacgctggtctcgaactcctgggctcaagtgatccacctgccttgaagtcctggaatgctgggattacaggcatgggccactataccctgctcatttgctttttatccatgctatttgtctctttgttccccctcatgtatatacgtacataaataaatatatatactattttatctgaaccatttgagaataagtgtatacatcatagccctttcctgctaagtggtatatttcctaagaataaggatattttcttatataacaaaagtgcaagtatcagcatcagtaaacttaacatttatttgaatttgcctaatgtactgggttctggttttgtaaattgacttaatgtcctttaaactattttcccctctagtactaacatcagggattgcatttagttattacgtctctatattcctttaacctgaagcattttcatagcatttctttgtcttttgtgaaaatgtttttgaagtacacaatcttttttttcttttaaaggctgtttttcattttgggttagatgagtgattcttgtaattggattcaggttatacatgctgaacaggaattctacataaatgatgtgttcttatcaaggtatcacatctattcctcattgacagtgttaattttgatgatgcaattaaggtgatggcagatttttaaaaatactataatatagcaaatactgtaatatattaaatactaaatatagctacattttctccctaaaactaataagaattgcttttatccctttatattattttatctttatatttacatttttttttgtggagaggagtctcactatgttgcccaggcttgtctgaaactcctgggcttaggcgatcctcctgcctcagcctcccaaagtgctggactacaggtttgagccactccacacagcctaaatgcttattttttatccctatcagtcaattactagtccacaatgaaattagcattctttaactctcctttctacaattaagatggtttggcttgtagccaaagttcctacctaatctttgttacacggttggacttcagttgaataaattgaagatggatgaatataaacgcccaaaaaggactataagtgactatcactgattttttacagtatacttatattttgtctcatggtgaattattttgaatagctcacacttctaagtttaaaatgaaaattgaagtctattggtctttagcttatagactgtacttagggtgtatttaagtaattcttcccttctgtccttgaacctccagacataaagggagcagtaggcataaaatgtggggagctgaccatctgccggtccggtcctgaccttccactagtagtgagaccaatccagctcttgctgctgctgtggctttgtgaggaggtgggtccaggtcctgatctcttcttctaaatatcagctctgtgaaaaagaacccttcctattctctgccctattttggagattgaccaagaggtatagttgagaggttcttcaccgttcttggttcacggtgccattagtgtctcattaatttttccagtatcccttgaacaaaggaaatacctaatggctaaaaattaagtagttagggctgggcatagtggctcacacctttagtcctagcactttgggaggccaaggtgggcagatcacttgaggtcgcgagttcaaaaccagcctggccaacatggtgaaaccccgtctctactaaaaatacaaaaaattggccaggtgtggtggtggacacctgtgatcccagctacatgagaggctggggcaggagaattgcttgaacccagaaggtggaagttgcagtgagccgagatcgcgccaatgcactccagcctgggcgacagagcgagactccatctccaaaaaaaaaaaaaaaa

SEQ ID NO: 58362 - DNA, 2097 bp, Homo Sapiens
ggcacgaggctgtgcctggcctctaattgtgctgttttataagttggactggcatggccttacttaaattttcaggaaactgttgagttagtaggtagaatattgaatgttaagtttgtccagaggccagatgccagaacttttggacaagtgagttaatgtccacctccagtccttagcacttgctctaagcgctcacaggcaacagggcaaatgcttgcatggcaggtgcacggcagtgccagccaggtctctcgcagggtggtgtggacacagatgactcgtgtcgagcacacgtgttgtggcctgcacgatgagctaaattgaacagtgtttcaggaaggaagccacatcggggagctgagaggtgggcgggaaggacacaagggagggatctgggtcctcgcaggtacttttgcctcttgttctatttgaagattgcagctgagaaggcgcgaagctgctggtccctgaaaagctgccgcctaccctggtctggagcccctgcgagctggcgtagagcaggaaggggttgcatcacggctgagtcctcccctgcgcagcacatggtacgatgccaccccaccgagggccgttctggggcccaggggccacgtcagccagggtgtcatccgccgggcgtttggagtaagcagggaaaggtgtcggcgtccagcatcctggtgcggaggacgctgccgaaccactgtgagaaggcggggagactgcttgtcaggctgagctgacttcctgggcggtcgggagaaggatgtgcagactgtggaactggcgggtgtcagggaccagaagttacgaaggcggtgggaagaggagcagctgtgggaagaaggactggctgccaagaccatgggctgtgggcatcctcagggcaggagctgggtggaagaggggcctcttcagtcctcttggcagtgaaggtaaacagatgtcagcagggtggactcgcactttgagcctaaggtagcgaggaggcttctgagccgacctggggatggcggcgcactctgatacaggcagtgcgcggctgtctcgtgctgagatcaggattttgagtaaagcagagatttctggacgtttgtccttcagaaattagcggagggacaagagcattggcgctgtggagaggtagggacccatgggtatggggcggaagaccagggcacgaccagacaccgccagggtgctgcacatgtaggtagcagggggaggtggtccaggcaagatgggatgggaggggctcaggagcagccaggttctagtgctggtgatgaggtgggtggtggcaggggcatgtggaagggtcttctgaccatggcttacagagggcttggtgctggggggcctggagttgtggaaagggtgaagggaagagttggtcccatattcccagatggcagagtggaaacagaagcactcggcccctgagcagccttcgccgtctttacagtgaacacagtcctcaaaccaaactgggaaggattcgaatcctggatgggtgatgtggtcctggctgtgtaaactgaccctgatgaaagacatgcccatcctgtgagagggacagccatctagcatctttttttttttttttaatttttattttttgagacagagtcttgctccgttacccagggtgtagttcgatggcactatcttggctcgctgcaacctcttgagcctcatgggttcaagcgattctcctgccttggcctcctgagtagctgggattacaggcatgcaccaccacacctggctaattttttacatttttagtagagacagaggttttgctgtgttggccaggctggtcttgaacttctgacttcaagcaatccgcccgcctcagcttcccagggttggtggaattgcaggcgtgagccactgtgcccagcccagctcagcatctttggaaaagagcagagggctgggcacggtggctcacgcctgcagtctcagcaccttgggaggccgaggtaggcggagtgctggagcccaggagtttgaggccagcctgggcaacacagtgagaccccatctctacaaaaaaaaaaaaaaaaaaaaaaaaaaaaaaaaaaaaaa

SEQ ID NO: 58363 - DNA, 1697 bp, Homo Sapiens
ggggaatgagtatatatttttaagtagagttctaaactagtggtgaaatttagtgttaatttctaaaatatttttggcagatgatttcactatataaccaaattttaatttttctggaaatagaggatataagatatggtttggcaaaggtttaagatgtggaaccctttacacaaaccaatttctctttgtctcttggcaggtctgtaatatagtggcaggacagcgatgtatcaagaagctcacagacaatcagacttccacaatgatcaaagctacagcaagatctgctcctgacagacaggaagagatcagtagactggtcagtaaggcatggtcttcaagatgagctagctttgagatgacaaaaaacaaaagaatagaaaactcctcctgggacacagttactctctggtttttatatatgcaggctttcctgttctttaggtgaagagcaacagtatggtgggtggacctgatccataccttaaagaatttggtattgttgtccacaatgaaatgacagagctcacaggcagggtacttccagcaccaatgctgcaatatggaggccgggtaagctttttattttattcagcaagcttcttccacaaccagtcaaaaagagaataatccagggtttctctactctgccactgctgaatttacccatagttttgttcattattgccttttgtgttctggctcatacctaatagaattttgtttattcactagtcaatagtaaaatggccttagattgtaatgtcttttctcttttcttttgtttcttcttcttcttcttcttctttttttttttttcaaagaataaaacagtagccacacccaaccagggtgtctgggacatgcgaggaaagcagttttatgctggcattgaaattaaagtttgggcagttgcttgttttgcacctcagaaacaatgtagggaagatttactaaagtgagtatcttcatattttcagcttagtaatatcccttccagatatgaaaatactgtctttatgtgaatgtgctgtgtacactggcactaaatccctgactcccatagtgacaccatctggctatatgaaaaagaccttgtattatagtaatttgcaaacttgggaattacattaagaatctgactcagcttccttacatgtagagcagaaatttgtgagtaacaaggtggagacaatgttggttggcaaattcttgagttcttattgaagcttcctttggtattaattgtatcttttcagccaagatcaaaaactagcttacttttaatcgttataatttactaatgagcttgttttattgcaaggtctctgggtaaaagtaggttcgcatcttacagatgcagctatctatataaaagaagttagtggccaggctcagtggctcacacctgtaatcccagcactttgggaggccgaggtgggtggatcatggggtcaggagatcgagatcatcctggccaacatggtgaaaccccgtctctactaaaatacaaaaaatcagccgggcatggtggcacgcgcctgtagtcccagctactggggaggctgaggcaggagaatcacttgaatccaggaggcagaggttgcagtgagccaagatctcaccactgcactccagcctcgcgacagagcaagactgcgtctcaaaaaaaaaaaaaaaaaaaaaaaaaaaaa

SEQ ID NO: 58364 - DNA, 1656 bp, Homo Sapiens
agcggtacgagggtgggggaaccggcaggatgactttgagaaaaagcaaggcacagcatgggtttgcaggccaggcggacctgggtttgaatcctagtcctgctactcagttgctttgcagcaataggccagttactaaacttccttatgcttctgtctccccatctgtaaaatgggctaatgcccacctctcaggattaagtgagaggctgtacctagagtgcatggcaggtgggaggcatttgggaagtatgcgctgggagaccgggggtctctaaagatggagatatttgggcttgagccccttcctgccacctttcctcctatctctgcctctgctcgctgctccaaaccctgtttctttactcccaggtagctgacactgagaagctatcagagatacaggcaaaagattagttgggaaacttttctggaaaactagtctatcttctcttgagttcctgtctcaacatatatgtgcccccttgttccactgactgaacggataagccctcctgtgggtgggctttcttgtcatctggtccacctttctcttagagaggacccctgcctccctcacttcagtccgttcgcagcacagtggggagaaggatggctttgggatcaggcaaaatccaagcctggccacttagtcgttgaacgtcatttcacctctctaagcctcagtttccttatctgcaaaatggaccaattgtgactagataatgagagaagccatgtaacagtatagttccaattgccagtccatgaacgagtgctgctccaggatgattagtatagtctatgagtgtgtcagtgtgaggatgctaactacacattcttgaaaggactgccctctgttctgagttacagccctcctccttctcttccccctcttccttattctccattttcttccctttcccacttgcctttccctccttcttcttctttttttttttggtgtaaacctgtcttttaaaaatggaattattttaaagaatttatcctacaatattcctgacatgccaaagatataaagagtaatataggccgggcgcggtggctcacgtctgtactcccagcactttgggaggccaaggcaggaggatcacaaggtcaagagatcgagactatcctggctaacatggtgaaccccgtctctactaaaaatacaaaaaattagccaggcatggtggcaccagctactcgggaagctgaggcaggagaattgcttgaacgtgggaggcggagcggaaggcagaggttgcagtgagccgagatggcgccactgcactccagcctgggcgacagagctagactccatctcaaaaaaaaaaaaaaaaatggtaatatggctgggtgtgatggctcacgcctataatcccagcactttggaaggtgaaggcaggcagattgcttgagctcaggagtttgagatcagcctgggcaacatagcgagaccctgtctctacaaaacccacaaaagttagctaggtgtggtagcacacgcctgtgttctcagttactcaggaggctgaggtgggaggattgcttgagcgcaggaggtagacgctgcagtgagccgtgatcatgccactgcactccagcctgggtgacacagtaagactctgtctcagaaaaaaaaaaaaaaaa

SEQ ID NO: 58365 - DNA, 1007 bp, Homo Sapiens
ggattacaggcgtgagccatcacacccggcctggatgctggtagttttattttctgcttagaaaacgcaaccatgttgatgggaccaaaaacttagttgaaagaagccatggcaaaagatgttgacgtacaactggctcctgaggctgtcaattgtttagagctcccaagtagtgctgcattacggaatctactacttagaagaatgtacaagatgtaagttcccatcggcaccgtcatggtaagaagaataagaaactctcaaaggaaaagaaacttacattcactttttcctggtccattttggttcctaagaatagataggccattaagaaggatattaggtttctaaggacaattttaacacaatactgctttaaaaatctgaagtttaaatagtttagctatttctgtaggttaattcaggcactgactaaaatcagtctcattatcatatacaaatgtaaggaagttaaattttaaaagcatgtataggttgtccttaaattatacaaaagcttttagtttcatcaggattatattccagttaacctttcatcttttttttttttccaaatgaactagggtctttaaaattcctaagtagattcttttgagtggtaggggagtctgtatagattacagatataatttattgtgataacaaatggcttcctgtttgacctcatttccaggtgtcgcatccgtggctgatttatttcacagatgtacatttgcatgtacttgttgaactttgctaggaaggactcaatttttgaaaaatctgttattttcactgtgggccttatgaggcaatctactgcaatggaaaaagggttccttggtcatttcaagttttattttctattagagtaatatctaacttcaattattttgccaagtttaaaccttctctctgtgtctgtggttagaatttgaaaataacaatgctctgcttaaagtaagagtcacagtcagcaaaaaaaaaaaaaaaaaaaaaaaaaaaaa

SEQ ID NO: 58366 - DNA, 1948 bp, Homo Sapiens
cagtaaaatgacatgtagaacaattaactgataaacagcatacagaaagaggaaagaacttcatttcatatgtttgtttttgaggaaaagatgtttgtttttgaacttcctgattcagaggggcttgtgggacatcttggttaagatcctgtagtagttctagtagggtctagaagtcaagagatacaaccccgcctggaaggatttgggagtcttcagcatttggaattttggaagccattgtttactgcagtgcatatgagataatttaaactggtacatagataaacacttgaaaaaattttaatagataggaatttaatgtgtatgagaaacataacttgcacatctaacctttgataatcatggacattatcacttaggccaagtgagctcaataaaagggaaatattaactaaaaatatatgtgatacatggaaatggcaaaaatcacggtgaagctatgcaaacgatgcaagttcagaaagtgctgtgttaagtcatgggtgtggtggataaattcacccaaggagagagtaagagtgagaagaaaagagagttgacattgggtggcggggaatggagaagaagaacccatgaaggaaactgaggaagagcagccagacgaataggaggaaaaccaggagaagatggtctttggagtccaaatgaagagttctgaggaggaagtggtccacagcgtcaaacttgtgcaccatggacaattttgctgagggagatttcactgtggcggattatgccttgttagaagattgccctcacgtggatgattgtgtctttgctgctgaatttatgagcaatgattatgttcgtgtgactcagctttactgtgatggggtgggtgtgcaatataaagattatatccaaagtgagaggaatttgggtgagtacgttggtatttttaatgttaatttatggaaagactacaaagggaggtccatccatcctgtcatagcaatacaacagatttatatgccttttaaaaatgtattcttactagtttttcactagaaatcagaacttttctttgttaaaatagagtttttgccagcacttaaatattcttaacatttaacaggctagaatacttcattcattcatttcttccctctccatatccatttttgcctttttactattaagtgttgattcattaaaaaaatgaggcacaaacattaattttaaactttttttttaattaagaatttgacatctgcagtatatggtgtagtaaaccaatttctgtcctgcaagattattgcgatgccattaaaataaacatcttctggccacttctgtttcaacatcaaaacagttccgtaatatcacgattgcatccctgtgtggacgccaacaattcacgtgcttctgagataaatttgaagaaactacaacatcttgagttgatggaagatattgtggatttggcaaagaaagttgctaatgattcattccttattggaggcttattgagaattggttgtaaaatagaaaataaaatcttggcaatggaagaagctctgaattggataaaatatgcaggcgatgtaacaattctaactaaattaggatcaattgacaattgttggcctatgttaagtattttctttactgaatgtaagtataaatgctttaaattgttacttgactcagtttttaaaggtgtttgggaaaatgagatatgtagttaagtgatttctgatttatcttagaatttaaaaaaagtttttattttgttatatatggctgaaaaagagaatttcttttttttattatttatttatttatttatttattttgaggcagattcttgctctgttgcccaggcggagtttgcggtgagccaagatcatgccattgcactccagtctgggcaacaagagtgaaactccatcccaaaaaaaaaaaaaaaaaaaaaaaaaaaaaa

SEQ ID NO: 58367 - DNA, 1445 bp, Homo Sapiens
gggatagcaactatgctcttttctaaaactagttttatctcacataattcttgagtaatttctctttctcccctaacccactgtgcgttgcattatttgaggcaccatgatatggctgcagatgccttttcgtgcacctgggtcaggatgggacctgcggaaatccctcctccttcccatatttagacagtgagacataccaaaggcaagtgaagcacatggtaatagagaaagctggcactacgtttgagctagtgatctgctggtgtcaactggcagtgttttttcaggtcatcctgcttgacccttatagatgtagagaagccaagtacagtgtagaaaacgtcaacttcctggtggtcacctaagtatttttttccccttcttttggaggggtatatggagagatttctactttaccaagaatgaagctggaactttaaatggtttatgtgtgttttataaaactttttaaaaacttgcaaaatcatatgttagtatattacagtttttacttgtgtcttgtctgcccagttgccaccacttgtaaattttttttttccataagcaagtaaaagttcagctggaagatatcttcttaattgagggttcaaaagccaggaatttaagcaaaagaggaaattcttctcaatattcaaaatacaaaaactctaaggagcatcttgttgactggtatattttagcattgagcatagtgcttgatactcagtgctccataaatactgattggataaataaaatgagatgtagaggcagtagtgtttattctcatttataaattagaagtaaacaatgtgatcacagtgaaaaatccttagcctgctttggataagaactttcactcgtgcactagagagagagggaatgtgggtatgaaagtgtgtgtgtgtatgtgtgtgtgtttgtggcattggcaaatagaagagaaggatttgtcttatctgctgatttaaaaaaaaagattttatgtttattatcaagaatgtagcacttaagatatatgcaacttaaaaaaactactgagtaaaattctgggttttgtccttgaaagaaaagtggcatttcctgcatgaaaaacagtttctattataaatgacaaaaaattgttagggagccaagctttgatgcatttactacatgaaggtcaaatacttaggtcattataattctgcccccttttgtgcatgcagtacaatgaagctctttgacatggtgctagcacattctcaagatgaaggaaggtcacgtgttttcaggcattaagagcatgatctactcttttttggttccctgttataagtggctgttgagggtaaagttgaggggagaaactggactaatgaatggcttttgtctacctttgtactattttttacttttcttgcacagaagtcaaaaaaaaaaaaaaaaaaaaaaaaaaaaaa

SEQ ID NO: 58368 - DNA, 1970 bp, Homo Sapiens
ggcacgaggcaaatgcgtgccaccatacctggctaatttttgtatttttagtttgagaccagcctggccaacatagtgaaaccccatctctacaaaaattagctaggtgtggtggcaggcccctgtaattccagctactcgggaggctgaggcaggagaattgctcgaacccaggagatggaggttgcaatgagctgagatcgcaccactatactccagcctgggtgacagagcaagactccatctctaaggaaaaaataaagaagttgaaaacatcatccaacatgtaatcaatataaacattattagtcagatattttatagtttttttgtgctaagttttcaaaatctgatgcatattttatacctagagcacatctcagtttagatgctacattttcagcaattgaagtgaaatatagccctaccaaaatgataaagttgtgtttaatgggaaaatacttcatttactttagttttaaaatatgttaattaaaattaaattaatttaaaatctaggtctaaccacatttcaagtgctcagtagccacctgtgtctagtgagtgctgtattagagagcatggaaatagagttgtggggtagggtgggcagcagcatggagctgcgtcaggaacctattgcagtaattgaagccaagatgttggccgggaccagagtgttagcagaggagtaggtgagaagtggttgtattcaagctgtattttaaagatccagcttgcgggacttatgaatggattgaatgtgggatatcagagaaagtgaggtctcaacagtaatcttttcagtctgagcagttgaagaatagagttttcatttactgagatgaagaaggagatttctggatggggtgggggcagtccagagttagattttggatatgttaagtttgagatacgtgtaagacatcaaaatggagatatgagaagatagtggatatgtgaatccaaagttcaaggaatagatgtaatctggagaaatatacacgagagtcatcagtgtatttaaagccaggagacttagatgggatcatctcatgaggaagggctcacagacaagagattggaggaccaagctaaggggctcccaaatgtttagagagaaggagccaacaactaaggctgagaaggaatggccagtaggttgggaggagaaccaggagaaaatggtggcttggatatcaagtggagttagtgtttctaaagaaggtgtgattttaaaaagtgtcaagagtagatggaaggttaaagtaaattgaaggccaagaatttcagtggaattgtgggggaaaattgggaagagagggttcaaaagaaactgagatgtggaggaagtggaaacagcaaatgctggcagattttgtgagtagttttgctgtagagggcaacaaattagttggtaactggaggaccgtggatggtcaagaaaagttggttttttgtttttgagatggaagaaattatgcatgtttatgtgctgatgagaatgatctgacagagagggaaagattgtgatgatgcaggagactgacttaaaagggacagtagttgaagggatgttttttagacaagaagatgaactacctgtatttttttttaagggccagttgaggtgacagaagaagaaaagcaagaagatggtgtaatctatagttagcatcttactaattaatatgaactcgcccaagttacatttttccatcattttattaaggtatagtttacatacagtagaatcaccccttttagcctagtgttctgggacttcagcaaacacatacaccaccacagtctaggtcattttaacttatttatgctgggtgtggtggctcatgcctggaatcccagtgctttggcgaggtgggaggatcgcttgagctcaagagtttgagaccagcccgggcaatatactgagaccccctccctacaaaaaaaaaaaaaaaaaaaaaaaa

SEQ ID NO: 58369 - DNA, 1945 bp, Homo Sapiens; identical to SEQ ID NO: 27021

SEQ ID NO: 58370 - DNA, 1828 bp, Homo Sapiens
gagacaagaacctggctgaagaaaacttggtccaaactgcatcagaggtgggggtggtcgctgttcccaagggaaaggtcctgcttaaacaggtgctttgtgagtggaaacgtggccagagtgcggcgggtgctttgtgagtggaaatgtggccagagtgcggcggatgctttgtgagtggaaacgtggccttctctggaagccctggggaggggctttccgactgagaggaaggcctcgcatctgcccaccgcccagtcctgggcctcacagtgaggatgcaggtcacgctgcacagatgaggcccgtgtggcaggtggtcccaggaacgaactcgcctcccgccagccccctgggccttccatggccccagccccttcctatgcagacacccctcacccctctctggccctgcttcaagccccccttccccgccgtgtgggcttctcgctgtcccctaagccttcgatgtcccctctgagccaccgcggccacggccaacagggatgcctccctcaccagcgcctcctgatagctctgggcctgagctcggtagagaaatggaagaggaaggtatatgcagtgtttgactgtctctgtttcttgtctcacgtcacaaaacaagactgaatttggatttctgaacgcgactgtgttttcctcgggaggatctcttgatcccaggaggtagaggttgcagtgagcccagatcgcgccactgcactccagcctgggtgacaaagcagactctgtctcgaaaaaacatacattgaaaaaggcagaagatttgaacagatacatcaaaaaaaagatagacaaatagcaaataagcacttgaacaggtgctcagcatcgttcgttgtcagaggaatgcacacgaaaaccgcagcgacagcgactagaacagccaggtgctgaggagggtgcggagcccctggaactcacccgtgctgctgagaacacaaatgctgcatccgctttggaaagcagcttgggagttgcatgtgaaattcagcatttaccacacggccagcagttctgctttggttattctactccagagtttccactgggggtcctttatgatttcgtctcttctatcatttttttggtatagatgggggtctcgctatttggattattgttgcaggcgtgtttggggtttttgagtagtggtagtgtctgaggtcagtcagggttgttctggccccagcagggctcttcgtagcttttcctgtgcaggtgaacaagcctgcggtttcacttgtttctcttaacttaaaggaactgttgttcccaagagcagtcttgggctgaactttcaaataaaatgagtttcctcagggagcttcagagctctttccttatggacggcctctctccccaggctgatttctctgcaccacccttctgggcactgggtaagacagcagcctctgatcttcttggcctggctttcccagcatgggtgctctaccctactgttttaacctagaaagcctgaactgtatttaaaacttgtggtttttaaggccaggcacagtggctcatgcctgtaatcccagcaccttgggaagccaaggtgggtggatcacttatggtcaggagttcaagaccagcctgaccaacctggtgaaagcctgtctctactaaaaatataaaaataagccgggcgtggtggcacatgcctgtaataccagctacccaggaagctgaggcaggagaattgcttgaacccaggaggcggaggttgcagtgagccaagatggcaccactgcactccagcctgggcgacagcgagactccatataaaaaaaaaaaaaaaaaa

SEQ ID NO: 58371 - DNA, 1590 bp, Homo Sapiens
gggtaggcatgagcctctatgcccagcccaagaaacaaaccctgcttttagaatcttttttttttttcccagctgtcctgtgtcctaggtttataactttgactaacttctagcaacttccaatcatgggagaattagagtggttatctgggatgaattgtttgaacttcaacctgttatcttggctgcagggctttcttggccacagggccgtgctaaagggcactttgatttcttgattttaaaagagcaagagaaagtgattgccaagaggagaggtttggttggcttttcttagaactaactgcctctccagagaagcctgcattggctgctcatcatgatgagggtcgggcaaggtcagtttccactgtcttctaattgttttcagagaattggacggtacaaagcaggtgccactgacaacatttcccatcattttatggaagagtactgattccgtcttttctgctcagagtggatctgtgcaaataacttttgtttctcaaaaatttctggtttgtcttgggatgcagccaggcctctaatgtggtggtgtgtgctgtgtcacaaacctcggccccaaaagcctgagcttggccttgtcagatctgatgagtgtgcatgagcaggaagccacccttcgggagaattcaggggcaaacgtacaagtaacgtttgtgaacctgtgcagacaaaggctttgggtagatgcctgtgagatgtggggatccaggtgacatgaagggagaagaacagaagacaggtaagggacttgtgggttttcttaactccatgtggctgcattgagaaaactagttaacatttcatgggctggtgggagcgtcatcttatcattctctcttttttttttttttctggtaatgattttttttgtttttttttttttgatattgacaaaagcttaatcatttcaattaaaaatgccactaatttgactttttaagtaaaaaatgtagggggttttaaaactactttcctactaccaaaaaatcagaaagtatctagctttctaaattgggaaagcaagcaatgttataaaaacaatgaaggaatctctttcttcgtgaccttttgttaaactcggtttaagctgtagaccttatttaaaataaaatttaccacagaacaggaaatagaagctgtggaagactcgaaatacacctttgtacttctctgttcttcacctgctctctcgctgtctctacacacacacacacacaaacacacacacacctatatttgcattaaaaatgggtagtaaaagcagtgaagggcaaacagaaggtacaatacaatcaagtaagaggttgaatataaactggaacaagtcttaattttttatttcactttcattcggatacgtttactaattttctttgctagctttaagacttttaaaacattctttggccctgggagggagttgtataaccataaaacttgagaatcctggccctagaataaatgttccttttaaaaccccaaggacagaaaattgaatacagctgtgcaaaaaagaaaaaaagaaaaggaaagcaaaaaaaaaaaaaaaaaaaaaaaaaaaaa

SEQ ID NO: 58372 - DNA, 3726 bp, Homo Sapiens
ggcacgaggcttcagtttcagagaaaagacctaccctactaaattattattattttttattttccagagtttattaaccacttaacctctcagaactgaacaaagacaacattgttcctggaacgccctctttttaaaaaaggtacatataatttggctttataatttctggcctgttgataatcagtggtacttttgaattctttaatgagttgtgtggagaatgatttttacttctggctataatattagagaaacaaattttatgcagtttgaatttcatctttactcttgatttaattagaaagtaagtacaggaaaagttattggcaagaatgtaaagcctatgttctttaaatatagagacatgagaattgatgactgaagctgtcattaaacatgactggctcaataagcttcttggtcatagtatcttttgtagtttgctttttttaaaaaaaccctttgatttctcagattgtttatgttaaacatgattttcaaactcatagaacgaatttagcattgttttctattgtgagatagggttacgaatcaagcttcgttgaccactagcagcttgtgaacattcagataaaaaaggagttttctaagagtgttcaagattttctggtcttttgtcagggcaatgcaaaatacactatgtgggttaatactgcttcctgcttttaacactttccctctagaagctgaaagcacattgctgtaccatatctctgaggtagtaattagtagacaagttaacctactttgaggatgaggaaatggaagcataaggaaattattgaagttgtacaaagctcagtgaatggttttaaactcaccacactggatttgtataatgcttttcttttctttctttctgaaacggagtttcgctcttgttgcccaggttggagtgcagtggcgccatgttggctcacctcggcctcctgggttcaagcagttctcctgcctcagcctcccaagtagctgggattacaggcgtgtgccaccacacctggctaattttgtatttttagtagagacagggtttcaccgtgttggtcaggctggtctcgaactcctgacatgaggtgatccactcacgcttgtaatcccagcacttcgggaggccgaggcaggcggatcacaaggtcaggagatagagaccacggtgaaaccccgtctctactaaaaatacaaaaaaaaaattagccgggcgtggtggcgggcacctgtagtcccagctacttggagaggctgaggcaggagaatggtgtgaacctggcaggcggaacttgcagtgagctgagatcgtgccactgcactccagcctgggcaacagagcgagactccgtctcaataaaaataaataaataaataactggtataaggaatgatgtgggtattttaggtgtatttaaaggctattgaaaaggactttattttgtagaaaaagtggtttattccttgatgttttttaattgaccaagtttctctgggagtggagcctctcaacaaactaaagagaacagaataatagatttacatgtgattgctgaaagatgtcgtcttgtgtctttgaggaagagtttaacacacagatcctttccagcatttaagaatgtgcaatctgccatttatgggttcacatgtaatagatgcttaataagtttttgtagactattgagtgaatatattttagaattgctattgctttataacagcgaggcacaggagtgctcctttgtatctgtatatccatcttacatcagatttaccaaaggacttgcaaggggagacatttagtgaaatgtttgtgatgatctgaaaaggaggcttctccagaattgggatgacttctttccttctttttttttttttttttcccagacacatcttgtttggaaatatcacttattatgaaggagactgatatgttgattaaacaaaagtatagctactgcattataagttgtgttaatccggtttaaaaattacttattaaaaatgtttttctggctgggcacggtggctcatgtctataatcccagcactttgttgaggccaagacaggcggatcacttgaggccaggagttaaagaccagcctgaccaacatggtgaaaccccatttctactaaaaacacaaaataattagccaggtgtggtggtacacacctgtagttcccgctactcgggaggctgacacaggagaatcacttgaacctgggaggcagaggttacggtgagccaagatcgtgccactgcactccaacctggacgacagagtgagactgtctccagaaaaaaaatgtttttccataattgcttaagtatttcatagtacaaagatttaacagtctgtaagttgaaagtggataagactaaccatgtattagtagcacaagataattaaaagactaagcacgattgcagatagttctgtaaaccatttctagaagggtctgccttcttgtatattaaatcactcggactgtgctcagtatggtctagtcttggtaggttcactgctgagtgctgaatacacattttgtgaccactttttagtacatcatgtataatttaaaaaaaactttcgtagcgctcatgtgcccagattctccttcaccacaacccatagaaactatttggcacttgtaaaacggtaactgccagccaaagcaagattctgtttttatgagaagatttttgtgttaccaagccaatcttaagaaccaggaggacatggaattaaggaatcttttaaaagaaacacctataactctatcattttgcagcttgtattatggtgcttatgtatgctatgtaaaattagggcttgagcctaagatgagtatgttttgttgatctggtgtctaaagcccttcaaatagggaaagaaccaggagatgaaaggtcctcatctgtgtgggaggcagaaaggcaggaaaatggcagcacaacacaattcacagtaagaggtgttttccagcaccagcgagatctgaagaatctttgcgtttcaaacttctcaacctaattttactgtgtataaaatagtgtttgtctctaagaagactctaacaaaacattttgatctctcaagtccttaatttacctggtggaaaacaatccttaaagacaggtttaaaggaaaagacttatttgcatttaaggacttagtcttcaggacagtactgttgagcaacaggtttagaatttacacagaagttctatttccaaagttccacagttccttgaaggctgctatgaactatatctatatcagtaatgaaaaacttaatttgttccttgagttatgtgggcaaatgatatattttcccccattcatcactgtgatgtctgttccggcttctctttgggagaggagcatctgtttgggtgctaaaacattagcatcaggccaggcgcagtggctcatgcctgtaatcctagcacttagggaggctgaggcaggaggatcacttgagatcaggagttcaagatcagcctggccagcatggtgaaacgctgtctctactaaaaatacaaaattagccgggtgtggtggtacacgcctgtaatcctaagtactcgggagactaaggcaggaaaatcgcttgaacccagaaggcggagtttgcagtgagcggagatcacaccactgcactccaccctaggcaacagagcgagactgtctcaaaaaaaaaaaaaaaaaaaa

SEQ ID NO: 58373 - DNA, 1860 bp, Homo Sapiens
cacagtccactgtgcagtcattctacatataccatataccatacagcccaaactgctctgacaaatacatgacctgttattaactagcagttaagtaccaaatccagtgggcacatttcagtccttacgatttatgttgcatgtactaatagtttgttcttgttcattgtattaatatatcacaactttaaaaccctcttcacctgttgatggacatttaggttgtttgcagtttttggttattacaaataaaattggaatgaatattcatttacaatatttctgtggacataggctttcatttctcttgggtaaatacctaggagtggaatgactggttcaaattatatgttcaagcttaaaagaaactaccaaactgttttccaaagcaatcgcaatttgcattcccaccaacaaggtataaaagttccagttgcttgtgagcatttggtgatatccaattttttcttcctaattttagccattttaataggtatgtaatactgtttatagtggttttgcatttccctaataactcaagatgttgagcatcttttcaagtgcttattagctgtctctgtatccttttttgtaaagtatctattcaagcctttgcccatattttaattgggtggctttcttaatagtaggttttgaatgatctttacatattccggatataaatcctctttcagatacgtgatttgcaaatattttctcccagtctgtagttcctttttaaaaaaattctcctgagtgtcttttgcaatacaaacattttaattttggtgaagtccagttgatccactttttcttttcagatcataacttttggtgttaaatctagaaactctttgcctgacccaggtcatggagaattctgcgttttcttctaaaagttgtatagtttaatggtttacactgaagtctgtatttcatgtttgggttagtttttgtactagatgtgaagtttaggtagacctttatttttatttttatgttttttacaaaaagaacatctattcatttattgaagttttaacaatttttatgtacatggacaatgcttgcacacaaagtcagcattctaatgcactttcatggagtcaaatttgcaaaacatgcataaaacaaattagaactctctaacagtctctatgcaatttatatctccagtattggaaatgatgtgaagattaaatacatggcacagagaattgtttaaaaaaaaaaaaagactgacaattaaaagtagtggaaaaaaatttttaaaagaaaaaactaaaaaaattcaatatataaaaaaactggcattagggatagatttgggcagttagcatggagatagttcataagatctggtcaaacatgatgcaactatcctgtgatggtgacttttgggatcttagatgttagagattgagactttggggattttgctcttttgggatttcaacactgaggattatggcgttcaaaattgtgtctcggtattgtgatccaaactgtaggtagaccttcttaaaatatatatatatatatatatggtctgggcatggtggctcacacctataatcccagcactttgggaggccatggcaggtgaatcacctgaggtcaagagtttgagaccagcctggccaacatggtgaaaccccacctctactaaaaatacaaaaattagcagggcatggtggtgcacgcctgtaatcccagctactcaggaggctgaggtaggagaattgcttgaagccgagaggtggaggttgcagtaagccgagagggagccaccacactccagcctgggccacagagcgagactccgtctcaaaaaaaaaaaaaaaaaaaaaaaaaaaaaaa

SEQ ID NO: 58374 - DNA, 2156 bp, Homo Sapiens
taaagaagctgaaaaggtaagttacaaattggaggaatctgtttacaatccacacaactaacagagcatttgagtaaaaaatatatcagtaactataatcagtgagaacatcacaacaagtcagaagaaaaagtagcaggagaatggatgagcatgtcgtagaagagcgaacacacaggttcagcacatgtgtgcagaaatgttcaacagcatgggggtcatggagatgccaatgaagacaattagttaccattttatgccttttccatcagcagaagttaagcctgacaatgccaagtcttgatgaacatgtggacccacaggatccttttacatagttggtgggaatgtaagcggacgtcccctgggaggcattgccttctatagttacatgttcatgtaccctggaacccagcagccccactcctgtactcagagtaaccttgcctgtgtgcacgtgaatatgagcatggatatgaatattcattgcagcactatgcacaataccaaaaacctggaagcaacccaaatgcccagcacagagagagtgaactaacaaaccctgtggtattatacaagagtcagaaccaatgaattatagcaatgcagaaaagcacaaattagttttaagtgaaaagttgaaaagtaagtccgataaattaacattcaccatttgtttttttttaataaaggtaaaaatcactaaaataaacagcccactttaacaaaaaataggtgcaataaaactataaaagagaaagcaagggagtgatgaacagaggttgtagggtgatgatacagaggatataatagggtgatagttacctgtgatgagggggtcatatgattagataacagattattgacaaggtcctaccttgtgtcttgctggtagattcttatgtacttatcatactattaacagtaactaaataaaggcaggttgtgctgggcccactcattagactgtgagatgatactgtggcttatgattaatccaatattgtatacctgagatccaatttaaaatgtgtgtgtgtaacaattgttgagaggattaaatgactcaagcatctcaagagtaccaggcatatactaactgttcaataaatgttacctgttaccactattatattagtattattgatgaaattacctctcatctgtgtgatatatttttgttttaggctgttactacacatctgtaaacaaactgcctacaagaagtcagatgatgggtctcagatcaactacatccatgtgtagaagatagctcctctgtgttctcagtctttctcctcttcttcatgtcgctgactcccacttaccttgcaggtctcactttattgttactgtttcggagattctgttcctgtatcccccagtgttattctgtggacctgtattattctgttttcatgctgctaataaagacatacccgagactgggtaatttataaaggaaagaggtttaattgacccacagttccacatggctggggagacctcacaatcatggtggaaggcaaaggaagagcaaagtcatgtctttcgtggcagcaggcaagagagcgcatgtgcaggggaaatcccctttataaaaccatcagatctcatgaaagttattcactttcgcaagaacagctcaggaaagacccaccctcatgattcagtcacctcccactgggtccctcccatgacagataggaattatgggagctacaattcaagatttgggtggggacacaactaaatcatatcaggtccttactaaaattccatactgcctatgaaactttatgatttactgtttaactatctctgaactctaagctctccctggactccaagctctacaagcataagaattatagtagttgaactttgggaggctgaggcaggcggatcacgaggtcaagaggtcgagaccattctggccaacatggtgaaaccccatctccgctaaaagtacaaaaattagctgagcgtagtagcgctcgcctgtagtcccaggtaatcaggaggctgaggcaggagaattgtttgaatctgggaagcagaggttgcagtgagccgagattgcaccactgcactcctgcctgatgacagagcgagactccatctctaaaaaaaaaaaaaaaaaaaaaaaaaaaaaa

SEQ ID NO: 58375 - DNA, 1388 bp, Homo Sapiens
ttttccttttccccttccatattccacagctgtcctttctgctgcctcccggagggcaccctgtcctggacacaaggctttgtcctgtgctgtgggtcatgcttggtgggatcgcttatcagcgtgaaggaggcactgaggtccatcttcttcagaagtctgtccttccttcctccaggcagatgccggcatcacagtcctggttaactaaaaccctgtgtctgatgtcctgccctgggccttccttgtctcttttctgtccccacccagaccataagcactggggaagcacatctgtcttcctcgctgcagcctctggtgcctgtgtgtctgcgtgctgacaccgggcatggccaacgaacatgttgtcttgtcacggtgcacggtggctcctttgcccgtgcggccttctcagcagctgctgcttctcctctaggactgaccgcaagtctcagagcgcgccggctggtgttttgtcgccctcaggagtgtggccgaggcccaggtgtgggtttcccgtgcccgccgtgacctggcagtgagggtctgtgcttctgtcagtgccgttggcctgagacatgtctgtcctggagaccagcacgtgtgggtgccgactctcagagagccccttgctcacagcaccaaaccccttgctgtgtttttattattaagaaatagaaaacaaagggcataaccagacttaggactttggtgattttctggctgaaggttttttttttttttttttttgagatggaatctccctttgtcacccaggctggagtgcagttatgcgatcttggttcactgcagcctctgccttcggggttcaggtgattctcccacctcagcctcctgagtagccgagattgcaggtgtgtgccaccacgcccggtaagtttttgtctttttagtagagacggggctttaccatgttggccagactgctctcgaactcctgtcctcaggtgatctgccggcgttggctcccaaagtgctgggattattcttgctggagctaagttgggattgactgcagtgcatcctttgtgaggagcgctgggggaaggtgtgaggaatttgaccgctaagccccagggtctggctggaaggaggagcttcgtggacaggccttgaggacgctttggtgcatttcctgaattgtccctgtgagaacatgccttatctgcagcagtcaggaaggctgataggaaagttacctagaaagccgggcatggcggctcaggcctgtaatcccagcactttgggaggctgaggcgggaggattgctgcaacccaggagttcgagaccagcccggacaacatagtgagaaccctgtctctaccaaaaaaaaaaaaaaaaaaaaaaaaaaaaaaaaaaaaaaaaa

SEQ ID NO: 58376 - DNA, 1299 bp, Homo Sapiens
gacacagccaacgtggggtcccttctaggctgacagccgctctccagccactgccgcgagcccgtctgctcccgccctgcccgtgcactctccgcagccgccctccgccaagccccagcgcccgctcccatcgccgatgaccgcggggaggaggatggagatgctctgtgccggcagggtccctgcgctgctgctctgcctgggtttccatcttctacaggcagtcctcagtacaactgtgattccatcatgtatcccaggagagtccagtgataactgcacagctttagttcagacagaagacaatccacgtgtggctcaagtgtcaataacaaagtgtagctctgacatgaatggctattgtttgcatggacagtgcatctatctggtggacatgagtcaaaactactgcaggtaatatgtcagaaataaacaaacacagtttgtaaaattttgttttatagatttaggggtacaagtgcagatttgctagtggatatattcagtagtggtgaagtctgagcttttagagtacctacccctcaaatagtgtgcatggaacccattaggtaatttttcatcccttaacccccccaaaactcttctaccttttgaagtctccagagtctattactccactctctatgacaatgtgtacacattatttagctcccacttgtgagaacatgtgataaacaaatgcagttttactctttgtatttctatttttataatttgaaattaccctatatttccatgggctgttaaatgcagtatatatattattagaaacttttctgagtttttaaaaattaggtagtaaatagtagcttttaaattgcacacatatgtcagaggtgcagagcagggaggacttctgatgcttctcacacttgccaagatggtgtctctctgctttggatcttttccttcaatttctatatcaggtattgttttaagaattgattccaggccggacgcgttggctcatgcctgtaatcccagcactttgggaggccgaggcgggcggatcacggggtcaggagatcaagaccatcctggcgaacacggtgaaaccccgtctctactaaaaatacaaaaaaaaaaaaaattagccaggggtagtggcggacgcctgaagtcccagctactcgggaggctgaggcaggagaatggcatgaacccggggggtggagcttgcagtgagcggagatcatgccactgtactccagcctgggcaacacagcgagactccgtctcaaaaaaaaaaaaaaaaaaaaaaaaaaaaaaaaaaaaaaa

SEQ ID NO: 58377 - DNA, 899 bp, Homo Sapiens
ggcacgagggcgcagggcccccgcctggctctacaagcccgggccgcggcctccgccttccccgccgcctcccggcgctccgtgcccgccccacgaggccggcggctgctgctacctggggccgttgctgcttgtgccgtgagtgacggccagccattgtccccgccgctccgtcagccgcgcccggccgcgcgcgcaccggaaggcgcattggcgtcttgcgggctccgggccgggtgggcaggatggcctccacaagccgcatggcgcgcatggggagcctccgttgatgccgccgcgccgccctccgaggctgcatccgcggaagcccggctccccgagcgctccggcccggcccggcgccccggacctgagtgcgtccccatgaaggcgcccgggctggcccaggcggccgtggcagaggagaccccggactgggcgcccgagctctgccccagctccgaggcgcggtcgccggagccgcctgccaaccgccttcaagacttcgacacgctggtcaccgtgggaaagcaactagaagccatttgtgtcaagaaaaacgttgacctcttggcgagaatgcaaagaagggaacgcttgcttatacactgttggtgaactgtcacccctacaactcagcttgcaaccagccctggccaccagtttccccacactgagctgaatatcggacatgcccatcttagacattccagcccattctgaaattccacatcgattcacctgacaaagtctgaagttccagggcaatttatctggaaaagcttacctggaatcacgtgtcatttcaaccaacaactgttgaagaggacgtggcattaaaaccaagggtatcaattatttataaaaaaaaaaaaaaaaaaaaaaaaaaaaaaaaaaaa

SEQ ID NO: 58378 - DNA, 2059 bp, Homo Sapiens
gtttaataagcgagcgagcgagcaagcgagcgcggggggaaaaaggcagagaatgtccgccatctaccctccgctcctgggcgcgctctcattcatagcagcctcttcatgaattacagctgagggggggcggaggaggggggggtaccacacaacaccccagcaaacctccgggcccccaggcatggctagctcgtgtgccgtgcaggtgaagctggagctggggcaccgcgcccaggtgaggaaaaaacccaccgtggagggcttcacccacgactggatggtgttcgtacgcggtccggagcacagtaacatacagcactttgtggagaaagtcgtcttccacttgcacgaaagctttcctaggccaaaaagaggaccctaataggagtattcataccagcagcagcagcagcagcagcagtagcagcagcagcagcagcagcagcagcagcagtagcagcagcagcagcagcagcagcagcagcagtagcagcagcagtagcagcagcagcagcagcagtagtaccagtttttcaaagcctcacaaattaatgaaggagcacaaggaaaaaccttctaaagactccagagaacataaaagtgccttcaaagaaccttccagggatcacaacaaatcttccaaagaatcctctaagaaacccaaagaaaataaaccactgaaagaagagaaaatagttcctaagatggccttcaaggaacctaaacccatgtcaaaagagccaaaaccagatagtaacttactcaccatcaccagtggacaagataagaaggctcctagtaaaaggccgcccatttcagattctgaagaactctcagccaaaaaaaggaaaaagagtagctcagaggctttatttaaaagtttttctagcgcaccaccactgatactcacttgttctgctgacaaaaaacagataaaagataaatctcatgtcaagatgggaaaggtcaaaattgaaagtgagacatcagagaagaagaaatcaacgttaccgccatttgatgatattgtggatcccaatgattcagatgtggaggagaatatatcctctaaatctgattctgaacaacccagtcctgccagctccagctccagctccagctccagcttcacaccatcccagaccaggcaacaaggtcctttgaggtctataatgaaagatctgcattctgatgacaatgaggaggaatcagatgaagtggaggataacgacaatgactctgaaatggagaggcctgtaaatagaggaggcagccgaagtcgcaggtgagtatcttggaaggaaaggggttgcctgtgatgaagtcagactctttcacaagccctgctgggataatcacagcaaaggtgtgaaacaccaaaaacggcagtagatggtcacattcatttgatgcagggtctccttggtatgcctacacacactttacagggaactgtttctcctttttctcagaaagaggcttttcctctaaaaatttttataggaaaaagtcacattagatgtccttgtccttggaaaagtatgccaagtggcaggactgactgttgaactaaagtctgttttcatttgaagagtttgtgttgatccactgctggagatagtctcagaatttgaagaaatgtgtttgctgtttgtagttagaaatacataattggctccagtgaattatgtgtgtgacctaattaaaactaggatcacctgtgtgttttccagaaaataaattccttttaagtgtgctgacaattaagtgccttaagtagctttaatgctgtgaggcataattccatgttataagatggtaattcatgtcacttataattaatactcaacttgaaattgccctgaggattttatttctttatcatgaagaaaacaaataggcatgcttactttaatttgtcttgagtggaaaaaatacgaatctacttgaatttaaaatccaattacatttataatatattgcattaaatctttccctgttatccattactatgtagaagaccctaagattcaaaaaaaaaaaaaaaaaaaaaaaa

SEQ ID NO: 58379 - DNA, 2935 bp, Homo Sapiens
gccagcccgcagagcacggtcctgggggtgtgatcacagctgctgaccgcggctcccgccgtgtgatgtgaccactcggaggtggggcgagggggccgggggccagcagcagggagtgtgtaaaaggtcttcttcctcacaatacgattgaaggtgtttgggacgtagggctcagatccaggagtgccgtcctccaagccttccataggattttgtgacgcccttgagaaccgcccttgtagactcagtcctgaactaccgccacgcctgtatttgctcctcctcatctcggattattgctttctttacttcctctgtgaagcactaaatactagtagctttttaagaacagaccacaacagtttcttcgtttgaccattactaagtctgcctccaaaatggggagttccgttaactttatcagccagccctgccaattttagttaagataagccttcgtgggcctccaaaggcctctgagagactaggtacccagagacctctgaggtatgttaaatggtttagttcgtggtggtgcaatgaaaacttaaagaaggaaaggaatctgcaatttgaactgttaacagaccccacatttacacactgcctatttgaataagaatctctttcagtattaaatgttttgtgacacacaaatgaatttgtacacagtcttttagcttgaatttgtagacagcctttaaatgttgtttggggatctttggactaattgtataagcgctcagtctggtctcaaactcatgatctcaggttatccatgcgcctcggcctccgaaaatgctgcgattataggcgtgagccaccactcccagccccttcttgtgatgatgtgagatgataaaatgcctgtgtgaagatgaagtgaggcgaataacctaggcagtgtgacataagtggaaaacgccagaaataaacaattcatgttataaattgtgcaccattctgagtagtgtgatgaaatcttgcactcctccattccatcctgccagcattgccagtcactcggtggccatctctgtgatcagattaacagtggttttatcagtatcatagggcttatgttcaagtaactgtattttacttaataatggctacaaagtgcaaaagtagcgatataatatttttggaccatggttgactgcaggtaactgaaattttagttacatgaaaccacagataaggggggactgcactacacataaaataggcataagtaacctcaagacaatagacattattaaaatatagaaaagtaataaagaagtgataaatggagaacttttgctttaatataatttattgtaagtttatataatttaatttttagtaacttcaatttttaatattttaatttttaatgatttatgtgtttaacaactgactcacaaaattgctgaaaatttcccaatcttgatgaaaatttcccagtctgctctcaggagcctatatgagccagcccagaataccactggagttataattttagaagattaccttggtagcaatctgtagaaatgttttgtaggggagctacagtagggatcaaaagtggagacagattacgaaatgtcttcagaccctgccagcatgagggttcaaatgatgtctagtcagtggagatcacgcaaatttcactggtttgtgttcccacgtggatccgtaggaccttcaatgcaagtctccttcaggtattcctggtggtatcttggcattgtctcacatgtgttttgagagccccacttccttggggagtcttccgctttggcttccttgttgatgaccgtgggccaaagggctttgtgtgtgaggctccacctcagccatagctggtgtcctcctgaagaggatttatgccaaaaggagtcacatgccaggacttgtttttttcaagtttgcaaatctggggggagggtggggctctagaaagatgctggaacctggtatgtgccctgcagaaatgtccttgactccttttgtcaccaggagcctaaatttactgtgtttctctgtgactcacagaggcagggggaaagacaatcctctccacttcttcctgcagctacttgctccatcagcctcagccagtctggggctgggcagggaaacaggccctcttccttctcctggtttgtcccctggtttgctcagcgagaccttcgtgtctgagggcccccttctcaccttgcagatcagctggtgtggtactgaatgcctgatggatggccaggggcccctgatccatctgcattcccagaatataagaatctcatttggggccacccagcccccactactcttagtatatgaaataaggtggaatagataagaggatggaactggcccctgggtgcatgatggggccaataacggaggtacagggtgcatatgtggctgggctgtgagacagggaaagaggatggaattgagatgcaaggtagaaaagcatgactatgttcagtttgggacttgatgaaatagatactggtaggacagttcactaggcactgggccttcaggagaaagagaagaaaggaatggtggcattgggagtagtaaagctgtgggtatgaatgagtatctatgagactcacctccctgtgaggacatagaatgaggagacacagtctacaggtagactaggtcgagttcagaagcctgaagaacaccagtgtttaagggatggtgttgggaaagggagccaggccagccagagaggaatgttccggaactctgaaaggaaggaaatggcaggaacaaaggagctggggcacaacagtggtgactcacactgggaacacttcggcccattgtgtttatgcttatagtttcccaagtttatcttttcagggttatgattacgttaacctcacctccctccctccctctaaaacaaaacaaaaaaaaaaaaaaaaaa

SEQ ID NO: 58380 - DNA, 2503 bp, Homo Sapiens
ccacgcgtccgcctgtggaagtgaatgaaacatttaatagggaaagagaatgttggccgagtctcagggaatgcccagtggtcaaagaaagaggaaggcagcagagtaacctgtagtcaagggaactgcgtttgagaaggcgttagtaaggtcatggatgtagagaggtcaggagaaagagaactgaaggatttgtcttttaggctcttagttttgacatctaggaggtcattaataaccttgaagattattgttacttgcttgatgggggtgaattgctgatgtctgattgctagtggttaatgagagataagtattgaggtaaagtaagccatgttaatactttgactacctagccgtattttaatagtctatatgcacttgttaatgtctgtctctcccactgtaacataagcttcctgagcgcagcattttgttgtatgttcttctgtcaccttagtacctagaacagtgcctggcacacagtagacattacttgtggaatgaatgactgatatgcttggcatatttgattataagactaaagggcaaaaaaccccaaagaaacaaaaaccttagcaaagccttgaaaaatacgcttacctgatcatgccctggagcgggaatcgaaaaatgctcccagccatcagttcagacgtcttcacctatggggtagagagtggctgcattgggcatccttttctgacattatattattttaagttatccttccttacgaatgttttcttcactaactaaatgggtgcattataatgagtatttcagagaatttgcttttattcagattgcctcacctgccagtatccagatccctcactgtgaacttgggtcctagactgaccttcatggttggggaagcacgtctggagtaaatcactgttagctttactcattcctcttccatgttgagttttgaatgatttcccattgcctaaggggtgaaatcccaaactctgtgacttagcgttaacctctatcagctctgtccttagccagtgtactaatttaccctgaataactttgttaccccgtctttccctgacttcccaagtaaagaattgtttcttcttcaggttgccatagcagttgatgcggttctgtagtaggcacctgtcacggtgtaaaggtgatgcaccgtgacaggtgctctgcttgtttccttcgtctttgtattcccaatgcttagtgcttttgttgacacatactaggggttcagtaagattaaattgcagtatctgcccaagagaaatgagaacaaatgtccacattaaaacttgtacatgaggctgggtgtggtggctcatgccagtaatcccagcacttcgggaggccaaggcaggagaattacttgaggccaagagttcaagaccagcccaagcaacatagtgagaccctcatctctacaaagaataaaaagttagctgagcatggtggtatgtgcctgtcccaactacttaggaggctgagacaggaggatcgcttgagcctgggaagtcaaggctgcagtgagccatgatcacaccactccagtccagcctgggtgacagagccagaccctggctctctctctctctcttttttttttttgagacagcatctggctcttatgcccaggctggagtgcagtggcaggatcttggctcactgcagcctctgccttctgggactcaagcagttttcccactgcagcctcccaagtagcttggactgcaggtacccgccaccatgcccagctaatttttgtattttttttgtggagacagggtttcaccacattgcccagactggtctcgaactcctgggctcaagtgatcctcctgcctcggcctcccaaagtgctaggattacaggcatgagccacttgcctggacaagaccctgtctaaaaaaaaaaaaaaagacaaagttgcagtcagtttggagccccccatgcttcctgtagtggatgatgagacctctgcttttttgctacacatgatgtgatctaatataaatcacatagtcgttctgcattaatttttttcacttgtacatttcagtaataatgtgattgaagaatgctacccttttgtgtctgcggccaaattgatttttgacaagggtgccaggaccattcaatggggaaaggatggtctctcaataaatagtattgggaaaactggatatccacgtgaaaagaatgaagttggagctgaggagtgggagaggaaagaaaaaaaaaaaaaagaatgaggttggaccctaaccttacctcatatgcaaaaattacctcaaaatggattaaaggcctaacttgaagaacttaaaattatgaaactcatagaagaaaacagggacaaatcttcatgacaaatatgtacaaatgaccaataagcacatgaagagtctcagcatccttagtcattaggaaaatgcaaatcaaaaacacagtgagctgtgacttcatgcttactacgatggctgtaattaaaaaaaaaaaaaaa

SEQ ID NO: 58381 - DNA, 2224 bp, Homo Sapiens
ggcacgaggagctagttagtggtggaagaactgaggtcagtctcccactttgtagcacagagctaattcataagagccctctgaaagtgagttggggtcatcaggaaactggttgcccaggagagccgtgatgggagaagataccagcctgaatttaaagcaattccatatttggttatgatgtcattttccctgtctctgtctctctcttttgacctggaggcatgaaagattcaaggcagaaactgaaatttaaattgagaaggcgaagaaaggcaacatctcacctccttaataagttataagtagatagtgaggcctgtgctagagtaatgaatggccaagcagaatctgccaacaagggttttcagtacaaagccaccctgaaaccagactttccgtttgcccggaactggcaattttgatgccttgggcaagttgcagtacacgggccctcggtcaactttgtgctccggatttggcacacagaggggtgttactaacaatgtacaccatctgctagcttcccgttttaactaattattcttgttaactaggtgctaagctcagttgtttctagacagttgaaggaatgctgggctgtcaatgtgtaaatctaacaaaatttacagtcacataatcttttaaaaccagtattaatactttcttgcaccctttaaattttggtatcctggcacaaagccaagtcacctgccttggctctgtgtaagtctcaccaatggacttgttactagggaggtgcagagtaagttaataagtgatgtgcgccgtgctcagtacacatgtgtttgggctgggaggagacaatggattgctctagaatcacctggagacattttctactctgctgtataccccatactcctctccttccaggtctgtcagcacagagatgggaggaggctgggttttgattgaacagagacagcaaaccataaaagatgaatgaggctgggtgtggtggctcacacctataatcctagcactttggtaggcccagtggggaggaccacttgaggccaggagttcaaaacagcctgggaaatacagccccaactctacaaaaaatttaaaaaatgaactggtgtggtggtgcatgcctatagttttagccacttgggaggctgaggtgggaggattgcttgagttcaggacttcgaggttacagtgagctatgatcatgtcactgcactgcagcctgggcaacagaaggaggccctgtctctggaaaaaaaaaaaaaaaggaaagtcttctaagtcttattctaaattgtgtgatcactacaccaaagcggttaggagctgtttgttctgtgttctgatagttatacatttttaagaaaaaatataatcaaggagataggcagctactctggtttccacttacaacaccagtgagaagcttcgtggtgtccagatgaggaggccactgggtagtatccattctcaggaaagtggcttttctcattgcagggtaacatgtggcaactggcagaagacatttcaaattgctgacaagtattctatcattctcctctctgacaatggtcatacaaactacttgagagtcatttttgacttctctatttcccactttttgacatggggttggaaaatcttggttcgtttccactgaatgtctcttgggcacatctattccagtcccaccgccactgctctaaacctggaggacagcaacagcttcctcactgatgccctggattcggtgtctcctctgtatatccttcctaccagagccagattagctttcctaataaccatctttctcttgctcaaaacctcacatggcttcttatttgctacaagggtgtgtaaacatatccttttaagaggccatatccttttaaggtccttaacgtatccttttaagaagctatggccgggcacagtggctcacgcctgtaatcccagcacattgggaggccgagggggtggatcacctgaggtcaggagttcaagaccagcctggccaacatggtgaaaccctgtctctaccaaaaatacaaaaattagctggacgtggtggtggatgcctgtaatcctagctgctcgggaggctgaggcatgagaattgcttgaacctggaggcggaggttgcagtgagctgagattgtgccatatcacttcagcctgggcaacaagaatgaaactctgtctcaaaaaaaaaaaaaaaaaaaaaaaa

SEQ ID NO: 58382 - DNA, 907 bp, Homo Sapiens
  misc_feature (662)..(662): n is a, c, g, or t
  misc_feature (902)..(902): n is a, c, g, or t
gaacagtcaatgagacaggcaggcgagccaggccaataagggagagaaccaggagggacagacacagaggcgggcactgcactggcggggtctccgcgctgctggctgcagccacactggctccctgatctctcgactgggccatccctgtgcccaggactcccccagtcttctccctgcacccccttccctctcatcatctcccttggtgttccgctagacacctcaaacttaagttcagaactgggttcctggtctctccatcaaaagaaaaaaaaaacccaccagtttgcctgccgttatctccatcttgggaatgacagctctatccttccagttgtttaggttaaaaacgttggaggcatccttgcctcctctcattctctcatgcctcccttcaatccattagcgaattctgctgtctctaccttaaaaatggatccagaatctgaccacttctcaccacctctgctgctaccaccttggtcccgaccaccgttttctcttgcctggagtattgcagttgcctccttgctggtgtccctgattctgtcctcacccctctttaacctagaattgttgcaggagccagcctgatcctgctcatatgtgaactagagcctggccctgctctgcccaagccctccaaagacacctactangctcagaataaaagcccaagcccttacaatgacagctctggcctccctgaacctctcagaacacacctcccctctcctttccagtccactctgctgcaaccacactggccccctcacagcccttgcaaacacaccacgctcatctgcactctggggctggggctacagcggatccctccggcctagaaagttctcgccctataaaccccccataggtcgctcttctactttccctcaggnccttt

SEQ ID NO: 58383 - DNA, 1612 bp, Homo Sapiens
gagtctcctccagatcgcagctgaaggatctgttgagcgcttcaggaaaggcggtgagatccggtaccgcagcagagcactctcagctctgggtcttgcaggcgcagggctcccccatgccagcagaaagatttcctctggtgaagaggaccgtcgaatctgtcctcctcaagacacctcttgtacagaatttattcgaatgccacggccaaggtcttccttgaaaaatgttaaccgatgtgtgctttttgtcttttgtcatcctttctttaggacaggcgacactaacaggtgaagatctcgggagaccatgactaagaaaagaattgctgtgattgggggaggagtgagcgggctctcttccatcaagtgctgcgtagaagaaggcttggaacctgtctgctttgaaaggactgatgacatcggagggctctggaggttccaggaaaatcctgaagaaggaagggccagtatttacaaatcagtgatcatcaatacttctaaagagatgatgtgcttcagtgactatccaatcccagatcattatcccaacttcatgcataatgcccaggtcctggagtatttcaggatgtatgccaaagaatttgaccttctaaagtatattcgatttaaggtagaaaattgtgtgggtatctttgtgtttgaagttgtttgccaagtaaatgaataacgtggtttcagttaccaatgtttacttctaaagattggcttgatttgcacatgtatttatcctacccaggcaaaaactccattctttgtcctcctttgctcctcaaaaatattcaagggacagtctctctttcatatattttggctgcagatacaggaagccacctggcagagtgttttcattaccttcatttcacattatttgattgcaataaacagatgaagggaaatgttttccccattacagaagggaactgataggtatgggaactttaaaactctctggttccacaacttgtccattactgcttagcccttttgtactttctgaagtactttccaatatatttgtttacatgaacatcataaaaacccagtaaagtatagctcttgggtagttaactctggtgtagaggggagaacatggaattgcagaataaaaacctgaattctggtgcttgccctaccactaactaacttagatgttagacaagcaatttcctcaatttcaatttttaaaaattttcttgtttgtaaaacaagatgattgtaccagatcacttctgtggttccttcctgctctaaagtattctaggacttttctataatttctgatcatgaccataaaagaattttatggtcagatatttctgacagctggcaaaaagcccaaaccttctgccttctgatcatcctgctaagtcatgcctttttctgcttaatgacaataagaaaatgaaaacatctagtgaacttctaaagtaagtcatttacattccagtggtgcttctcttcatttatttaaacaatacttattgaacaagtttgctaccatactaagcattgaatatgcaaagacaaaaaagaaaaatcagtaactttatagtctagcaaaaaaaaaaaaaaaaaaaaaaaaaaaaaa

SEQ ID NO: 58384 - DNA, 1350 bp, Homo Sapiens
gtttgacagagtaatcttcatgtttggttgatacggtggagattacttattttaagtaacataattgttacttaaagattttgtaatagtggaacgtgcgcaatccctagtattataacagtgcttattttatggactggtgtgtacatagtactgtaggaggtgctatggagatttttaaaaatagcttaagaaaatatttgtcttttaagatatttaaaataaagctagagaggaaagtatgccaatgctagcaaacacaaactgctgattataaataagtttcatttatgtgtaatggaaaaaattagagcagtgatgcttatgtaatgaggtttgtcaaggacagcttcttgaagaaggtgaatcttcagtgtgtcttaaagcatagaatctgcgttgatgacgagaacaccgtccacccaggtgtatggcacagtttgcagagaagttacgtgccatacgtattttagtctgcatagaataagctagtatattttttggcatagaaattgaaccttcagtaggtgaagtgcaggtcttaggagaagatttaagaagcatgttggagaaaattatttgaggagttttgttgcatttgtaggttgtgcctgtgtattttaagatactggtcatgttagagatccagaagaaatttacctttcagggaatattgctagtgagtatctcaatatttgcatttattttaaatgtttttcataggatacctttgtggcagtattttcatttctgtctggaaggttagtgcacatttctgaacaggctgctttgatcctgaatcgtaagaaagatgtcctggcgtcttctcactttgttgacctgcttgcacctcaagacatgagggtattctacgcgcacactgccagagctcagcttcctttctggaacaactggacccaaagaggtaacaggaccaatgttcagatgtctatctttcctcatcaagatcagtttcattcttacaggaatagtacagaaattaacatattatttagaacatgcacactatctggtttttcttattcctgttatagaaagtcacgtgatgaaaacagcattttaaaagcttctgataacatactcaatacgtttgtttccattttgtcacatctgtttcacagatgatatgtcataaatattatttcattaccagcatattgtatagtggtttagttgctatgaaggctctgtttcctttaagttaaaattaaatgtttttcctccttcaaaaaaaaaaaaaaaaaaaaaaaaaaaaaaaaaaaaaaaaaaaaaaaaaaaaaaaaaaaaaaaaaaaaaaaaaaaaaaaaaaaaaaaaaaaaaaaaaaaaaa

SEQ ID NO: 58385 - DNA, 1287 bp, Homo Sapiens
gggatgaattgattaaaaactgcaacaagcatgatggaaggggaataatagttgatgccaggcagttgccttctccagagccttgtgaaattcagaaaaatttgaatgataatgaaatgctttttcattcttgccaaatggtagaggaaagccatgaggaagaagagcttaagccaccagaacaggaaatagaaatagatagaaatatcattcaagaagaagaaaaacaagcaattcctgagttttttgaggggcgccaagctaaaacaccagaacgctatttgaaaattagaaattatattttggatcaatggtaagaaagaattacattatagatgttgttttaaaatgtgatattctgaagtattttaattaggcctatacagaatttagaattttgctagtaaatctagagatcactacagtagggaagatttaagatttcttgtaatgaaaaaaagctttggtaaacattatcacctataactctcataacccatctttttgcctattcattagattgtgggcctggaataaaagggatagacgattgctttatgaagcagtctcctaggacagcgttaggaagatatagagagaacaccactgcacgggaaaagggaaataattctttccggtttatcatgtactttgagtacaaagatagaaaaatttgatgacagcagtagtattaaatgtggccagattgcagaaacacttctaaatagtgatcttaaatgcttttaactttgaacttgtgacaataatgtgctattaatttcttcatccagttttatcaggatacagttttctgatagatgaagcttattctctagattgtcagtaccgtttatttgaattatttaatgaagcttagggaacaaaccccaaaatttcccaccttactagcctaatttgaattttttaaaacagcttaattaaaccatcattaaacatttataattgctggctgggcacagtggctcatgcctgtaatcccagcactttgggaggctgaggcaggcagatcatttgaggtcaggagtttgagaccagcctggcccacgtggtgaaaccctgtcccttctaaaaataactatatatatatattagctgggcattgtggcaggtgtctgtaatcccagctactcaggatgctgaggcaggagaatctcttgaacctgggaggcagaggttgcagtgagccgagatcgtgccactgcactccagcctgggcgacagagcgagacttcatctaaaaaaaaaaaaaaaaaaaaaaaaaaaaaa

SEQ ID NO: 58386 - DNA, 1842 bp, Homo Sapiens
cgccatggcccgggcgggcagctgcggcggcgccgcggcgggcgcagggcggccggagccctgggagctgtccctggaggaggtgctgaaggcctacgagcagccgctcaacgaggagcaggcgtgggccgtgtgcttccagggctgccgcgggctgcggggctcgccgggccggcgcctgcgggataccggggacctcctgctgcgcggggacggctcggtcggggcgcgggagcccgaggccgcggaacctgcaaccatggtcgtgccactagccagctcggaagcccagctgcacagatgaggggcacagctgacgtctgcagggccggcctcccagacacagagccggggtcagggagacgacttcaggtgcaaacaggaaaaatcagcctggtgaccagtgccccgaaaccccacccgaccaaaactggaacctcaccgcagggcagggccttcctctcccattcacctgccctgaagtcatgtctggaacgtcatgtttccactttctactgcctttttagttttctttctttgttttttttgcttttgttcattttattttattttattgttttgagatggagtcgcgctctgtcgcccaggctggagtgcagtggtgtgatctcggcttactgcaagctccgcctcccgggttcacacctttctcctgcctcagcctcccaagtagctgggactactggtgcccgccaccacgcccggctaatttttttctatttttagtagagacggggtttcaccgtgttagccaggatggtcttgatgtcctgaccttgtgattcacctgcctcggcctcccaaagtgctgggattacaggagtgagccaccgcgcccggccttattttattttttaatagagatgtctcactatgttgcccggactagtctcaaactcctgggctcaagccatcctcccacttggcctcccaaagtgctgggattacagttctgagccactgtgcctggcctctttttttttttgagatagaatctccctctgtcacccaggttggactgcagtggtgcgatctcagctcactgcaacctcggctagttgcagcgcaacctccgtctcctgggttcaagcaattctcctgcctcagcctcccgagtagctgagattacaggcgcatgccaccacgcctggctaatttttgtgtttttttttgtttttgagacagagtctctctctgtcaccaggctggagtgcagtggcgtgatcttggctcactgcaacctccgcctcccgggttcacgccattctcctggccagcctctcaagtagctgggactacaggcgcccgccaccatgcccggctaatttttgtatttttagtagaagtggggtttcaccatgttggccaggatggtctcaaactcctgacctcatgattcacccacctcagcctcccaaactgctgggattacaggtgtgagccatcacgcccagccttttttttttttttttttagatctaccctcttgttgcccagggggagtccagtggcgtgatcttggctcactgcaaccgccgcctcccgggttcaagcaattctcctgcctcagtctcccgagtgtcttctgtcttttgtaaaagtttttcatgcccaagtgagattaattgtttaaaaaaaaaaaaacaagaagaaaacaacatagatttaccgcaagacctattgatatattattaaacatggtggtatacccagggtgggtgtgacacagaccaaaagaggctgtgtgttctgttgttgataatttaaaaacaataataaaaccgaagtctatgtcaccacaaaaaaaaaaaaaaaaaaaaa

SEQ ID NO: 58387 - DNA, 2470 bp, Homo Sapiens
agcggatgccatgtgaagacgcagggagaatgtgacatctgcaagccaaggagagaggctgcaggagaaaccagctctgctgacactttgatctcaagctctggccaccagaactgtgagcaaataagtgtctgttgtttagggcaccctgtccatggcaccttgctccgatagccccaggaaacgaatccacagaggaggaagccgaggttgggaaaggtggagggacttgcccaagtcacacaaacgacaactcagaagagctgagaattggcacccagggcaactggagtccatcctgagcttgtcactgctgggctctgagacctcctggtgaagaaggacagtggcagagacagcccgacccagagaaacccagcaacgctactttctaagggcatttttccctctcatttggaatcctgagcctcctgctcgtcctgtaggccacacccagcaaacagagctggctgggaactgggagaagagctggagcaacagcctgcatccatttcctcttgctgcaataacaactgatcacaagatggagtctcactctgtcaaccaggctggagtgcactggcgcaatctcggctcactgcagtcacctcctctcaggttcaagtgattctcctgcctctgcctcctgagtagctgggattacaggtgcatgccaccacgctctgctaatttttgtatttttagtagagacggggtttcaccgtgttggccaggctggtctggaactcctgacctcaggtgatccggctgcctcagcctcccaaagtactgggattacaggcatgagccaccacaccttgccacaaatgtggtttttaaatgtggtttttaaaaatatcttgatagccatatttccagtgactcggtttcctgtgtaatcctacgtatttgttatgcatgtacaaagaagacagggcatgaaggtgtcaccagatgccacagcagcccacagcacagaaaaggtcacaaccacctacttcagagaaaggcactggggaccttggctatgtggacaagaaccaggagcttgggcttcccaggcacagcagggaagcctgcaggggcctgacaggtggataacctagtgcccaaggcagggctgggtggaggagagagtggcaccctctgattgtctgaggtctctatctctagaggacagtaccacagattggaagccaggtctttccagagtccctgtgacctcctctttctgcatgaaacccagattgagtaggaaaatgtccccaggaggaagcagccactgcccaagggagacagctagagactcgctgggcaggctacatccctgggcttctctcggacccgacaagagcctgtccatccattcacctccactaagatcagggcaccccaggagtctcggcagggccaccccaggctctgctctgccctggaaaggtcctcgtttcacactgactcagtttcagttttggaaggaggtcagaggttgcctccatgtcccttctccccactggttctctggaaccctccatcatagatgtccctgcccttccttccctgctcaggagcaaaacccccaacccccaggagctggtctctctaagtcctcttggatcaggccaggctcagccctggaggccacagctcaggccctgagccagcccaaggggcagggcgaggaacctacattgttgtgtgcccagcccctttaaggggcccatacagacaagagcaaattcagtaggttgcgtcatccactctatagtgattaaacagggatggtggagaagtagagaagtgtcagctctggaaccaggtggccctagattgaaatcctagctctgctatttaccagccaggtggccttggataggtgatttgaccaataccgttcctccgtttccccaccttgagtgttattgcaaggattaaatgagttactacaaagtaaagtactaaatacatatcagctattattattattactactactattattattatgagccaggagatggggactgtgacataggctgctggtctcttctctcctcttccataagaatagttcaccccatccttagctgggtgtatggccacctggcccaaaactacatttcccagcatcccttgctgctagatgtgaccatgtgatcaagttctggccaatgagatgccaggagaagtggtttggcccacttcctgggagttttctttaaaggacaggggcaatgccttctccttttcttctcctttctgctgaccagaatgtgagcatggagtctggagcaggagcagctgttgtgcactgtgaggttgaagccgtgtgttgagaatagcagagcaacaaagcaataggagctggagcccctaggggccatgaagcccctaccagccctggactgcttagatttacttgagcaagaaataaacccttgattgtttaaaccgaaaaaaaaaaaaaaaa

SEQ ID NO: 58388 - DNA, 1569 bp, Homo Sapiens
agcggtgctcctattcccctagatcctttagcgtgtaattctaagatcaagggcattctctgatgtagtgtattacagtgatcaaaatccggaaacttaacattgacacaatactattatctgaattactatttatattcaaattttgagagttgttccagtaatatattttacaaggacaccccttcctctccctggaccataatttaatttttaaaactttgacataccttcaattagtgttttctttatgtcagtttttcttttctcttaaaaaaagcttaacagaaatcactgaggttttaaattactgatttctttttaataaaagcctttcaggaagaatgtgtgatcatttaggaaccaattttgacagttgtgtgatctgcatgaaccatcaggttgggagagagtcagaagttagaataggtactgattttgtcacctgattgtggaggagtcgcaactttttctgaaccttgatgtgttcactgtaatataggcttaatgatatgtgcttgcctgtctcattgtgtgtataattgaagtttctttggaacttactaacacaaaaaatacagttaggatgctgacttttaggattccaaacctagttctgtcaaatgaccatttctattatgatgaggaagagtgataaagggatttaaggattaagaagccctctttgtcatatatatctttagatgataatgatgtgatacagaactttgtatgcaaaaagagctgagatttaaatttgagaattatctccatgtaagtgatgatagaacttacttaaagtagcaaaatctcacagaacactgtagaatgaacagcgttagtggctctagactaagccatagatggcacccacatatagcaggaaattgtaatttataaatatttccagatttatcaggcaattctctttcctaacattgaaattttgaaaacaatcacagaataaatgaactaaagacaaataatgaaagtcacattattactttttctttttcttttttcttttctttttttgaaatggagtctcgctctgacacctaggctggaatgcagtggcacgatctcggctcactgcaacttccatctcccgggttcaagtgattttcctgcctcagcctcctgagtagctggaactacaggcacgcaccaccacactcggctaatttttgtatttttaatagagacagggtttcaccatgttggccaggatggtctcgatctcctgacctcgtgatccacccaccttggcctcccaacgtgcttggattacaggcgtgagccacagcggccggcctactttttcagtctcttagatagataattcagttctcctttgtgtgaaaaatatctttgactaagttgtgttgctttttaattttttctttttagcagccaactcttcctgccaaataaatagagtcatcagtcatcctactcttccgatcagcatcactgctcatgaagacaggcacatcaaattctatgataacaatacaggtaagaatttattaagaattgatttttattaaagcaaaaaaaaaaaaaaaa

SEQ ID NO: 58389 - DNA, 1346 bp, Homo Sapiens
aattgttcctcgtctgataagacaacagtggagaaaggacgcatgctgtttcttagggacacggctgacttccagatatgaccatgtatttgtggcttaaactcttggcatttggctttgcctttctggacacagaagtatttgtgacagggcaaagcccaacaccttcccccactggccatctgcaagctgaggagcaaggaagccaatccaagtcaccaaacctcaaaagtagggaagctgacagttcagccttcagttggtggccaaaggcccgagagcccctcacaaaccactggagtaagtccaagagtccaaaagctgaggaacttggagtctgatgttcaagagcaggaagcagccagcacgagagaaagatgaagaccagaagactcagcaagctcacttctcctaccttcttgtgcctgctttttctagccgtgctggcagttgcttggatgatgcccactcatattgggtgggggtgggggggttggggagggtctgcctcccccagtccactgactcaaatgttaatctcccttggcaatacgctcacaggcacacccaggaacaatactttgcatccttcaatccaatcaagttgacactcaatattaaccatcaaatactattataaggagaatgttgcatgattttccttctagtctgtttgtaattcacatctaatgaaagagtgagagtggacgataaagggaacttgttgaaacatttctctcaaagcaaaagggatcattggaagcaggcagacaccagaattggtttaacctaaaaataacaaattaataattatcaagtctataatgatgacagtgacttaatgtgaatagaaagaattctaaactctctccttccttcctccctcccttctttcctactttctttccactccctttctcccacccccttttcttttcctttcttttctcccaccctctctccctccctttcttttattcaatgcatagtagttgaaaaaatctaaagttagacctgattttacactgaagactagaggtagttactatcctattactgtacttagttggctatgctggcatgtcattatgggtaaaagtttgatggatttatttgtgagttatttggttatgaaaatctagagattgaagtttttcattagaaaataacacacataacaagtctatgatcattttgcatttctgtaatcacagaatagttctgcaatatttcatgtatattggaattgaagttcaattgaattttatctgtatttagtaaaaattaactttagctttgatactaatgaataaagctgggttttttatttaaaaaaaaaaaaaaaa

SEQ ID NO: 58390 - DNA, 3740 bp, Homo Sapiens
agcgggcggcgcaccacgtgggccaggcgccccacgcctggagctcccctctctggagccccgggaaaggaagcggggcagggaggccgggtgggagcaggggggtctccggcgcttcctctcctctgcgggcgccgcgcggctcctgagagtccgccccccgtcctgacgctcagctaggaagcgggtcctcgggcccctcccccgacacacacacacacacacacacacacacacacacacacacactctctctctctctctctctctctctctctctctctctctctcacacacacacacacacacacagcccgtctcgcgcctgaggtctcgcccgcaggccggtggcgcggggtcagctgctgcctgcggtccaggacggggtcggttccgccgcgcggcgcccaggcccagctcgtccagagtctgcggacagcgcacgtccaggtaacgcgcttcaaggggccgcggctcggagctgggggaccccgggccgccctgcccatacgagtgcgagcgtggagagcgcgggcgggggcgcggtcccgggggccggccagctggagggggcgggagcgctgggcggggcctgcgctgaccccggcgctgagtccctggggccgccgggcggatggcgtggccggacgcgggggccccgggccttccgggcgtgacctagggctcgggggcggggaggcccctccggcggggcggccctgggtggtccggcagaggcggaggccgctccgagcctgtgagccctgggcgcctgcggaggcggggagagggcggggtgtgccgccctggtggggaccgcggggtcggagaggggacattgccccccccgaggcgaacgtccaaccgcgggtccgggtccccgcccaaggccgccccgcgaggtggcctcggcccggccgtccccgagggtggctcggatcctttcaaccagcgcgctggaggcgaaggggctgcgccattccgggtcaggcagccaacgcgggacacgcgcgtctccgagcttgcggcccgcgaaacccgggtgacctaccgcgccggtgccctcaaagcccccacgcccgggccggtggccgctgcagccactgagccacgcggtctccccggcccggtcggcagaaggagctggtccgttactagaaaagtccagatgcaaagtcgggggtcgtgctgccgcttcctgccagcgcaccgcacccacctggggccgccaccgaccgcacaggacgcgcctcctaccccctgttctggcccggccgagagctggtgcccccagcggccgcccgcccccgtccgcagaccccggggcccttgctgctttgcattgggaacaaccggagccaggcccggagctgagggggccagggcctttggaggaagcattggcctccaggctgaagagcaagggccgtgtcacctgcccggagggcggtctcatctctgcagccaggtcagaggaagcagcggtggggagacggagtgcgcgagttgggaggctccacgcatcgtaggtggagagctggctgccagcctggcctgccctctcttccccgtcccaccatctcgcttggctccggcacctgcctgggaagacccacacctccgtctgcagtgcctcttccccctggaggccctgccctccgctcggggtccccgcatccttccgtggccctcagagcatcgcctggggcgcccgcggaactcatctgttaggcctgggatgcaggcaggcagaagtgggggtttaagtggaagcagtgagggtgggggtccggtccaaactgtgccaccttccaccccctgcccctgggagagcagacatcgcccactcgggctcacagtgccatccgggtgaggacctccgtggagagctctctttgccaaagaaaagcagttgcattaggtctgcgagcaggcagggtggcctcttcctggctccccatccaccaaggaagcttcaagtccctgggacacaggtggggaactccagcacccctggaggaagggagactgaggttggggagtggcatccaggccctgactctggggcacggtggtctgtgcaactgagaccctgcctcaggctccaacaacgcctgctcctttccccaggttgcagtgatcaccaggggaggtgctgggcgtgcaggctgccacaggaggggtggggaggtggggagtctctgtggcggggtggtgggggcctgggccagtcagctgaggacgtgttggtgcactcccgggagggcggtatgtgggtgaggatccccatgcagagtggtgcccacaaaccccccttccagagtcatctctggtccaccttgaagtccccaggaaaatgacctcgtcctccgcgggtgtgagccactaggcctgagaggacgccgggacggagctttcagagagggaggtgtcgggatggcttgagggtcaccagcccagacgtcctcctggtcctcctgatgcccccgacctccacggaggacgagcatttccagcccagccctccccatcttcacctcgcactcccctgacacactgggagcctcctgatccgtgaacccgcgctggcgggagtagctactgaccgctggggacccctgcccaggctgttcgcatgtggaaaggattcagggagcaggcgatgcccaaagcgtggagaccagcactgctctctccccagtgacaggtgcacgcccagatcacggatgtgtcgggaacagctgtgctcctgctgctcagcgtccgtcactccaggctgggagcgggtccccaagcttctggctgggcctatccgtctccactctcagtgtgggggtggggggcgccaacagcacgcatttgctctctgcacttctcgtctgataatgggcagagggtccttctgcagccccaaaacatccctaggcaggagccctggggccccaagcagccagggaggtgagcaccaaggacctcccagagagcgtcaccttccgtcgagggaggcccagcctgggggcggtgtctgagacttggaatcaacgcttccgttggtggcagtaaatcctgtccctaaccctgcagtacagctgtgccgtgtacaggagggtgctgtctgacgccagacacctggactacagatcgcagcctgattcctggtcattgctccactgaaccccagaccccagcctcgttctgggccctcatcccctagatccagggaccccagccccatttcagcccttgggcccttgtaggatgcgaggccctgggccccagcccccagcccatccgtggcccaggcactggggggctgaggtcctctgagaagggacacagggcctggggggctctctcagcccatcagcaggagaggactgactccagaaaaatcagcgtttgtacccactcaggctgccaagacctgtgtccgtccttccaagctcaaccttcagagttcatgaggccccttgcccagaatgtccacagagttcatgaggccccttgcccggaatgtccacatttgaaacctcccaacaccgagccccatttcaagtataaccaggagggaaaatggtgcttgaaataagcatgccacaaaggaaaacctgctttctcgaaatgggccctggcagcccaggccctgacctccccggccaggatggaacgttccagagacccattagtgccaaaggcaaatgaaaacacaccctgtgaaaatgtcaaaaaaaaaaaaaaaa

SEQ ID NO: 58391 - DNA, 1032 bp, Homo Sapiens
aataactgttgtgtaaatcatcagcagtgtctactaagataccatctgtaaccataggcttctatgttttataatataaggctgtcttttaaataaatcagattccctgttaaagatctgttctagattccctagggggttgacctcatatagtatcttctttttctttggttacaaacttttaaacttgtctgaggttataaggtgaattcaactgtccactgtcaatgtagatatttttaatggatttagggatttaaattacatgattcagaaccactttgaggaagtctagggaatatcagttgtttctgtataatttctgaaagcttcactgttttctaggtgtgcacttaattcatgtgatgaagggaacagtatttacatgagtggtttggttaatttttcccctcctaagcttagctttgtgtatcgtgcgtgcttccagtgtttttgtggctgctttacataagtcttttagaagtattttctatttttgaagtaaatgtggatcaaaaccaccccaagacaggattgaaaaaaagacagtttttcgcaagaaagtaaataattttatttagcttgggactttaaatgatatgtcttaaatgtaaacatttctatactgcattttggccatcttttgatactagttttcagatgcatattgttatttcatttattattggaaaagtagtaactttaaacaaatttttattgaaaatgctgacagaggccgagtgtagtagctcacacctgtaatgtcagcactttgggaggccgaggcgggcggatcacgagctcaggagatcaagaccatcctggctaacacggtgaaaccccgtctgtactaaaaatacaaaaaaattagccgggcatggtggcaggtccctgtagtcccagctactcaggaggctgaggcaggagcatggcatgaacctgggaggcggagcttgcagtgagccaagatcgcgctactgcactccagcctgggcaacagagcaagactccatctcaaaaaaaaaaaaaaaa

SEQ ID NO: 58392 - DNA, 2356 bp, Homo Sapiens
gcgggccaggcagatcgaggggtgtcgcccaaaccgatctgtcgacgcctgaaggggcctgaggagattgctaggcttctcagctggggcttcttcaccctcatttttgtccgactggctggactgtagaacctggcagaagccttggggctagggtgagggtcacggcccagggagccctaaaatgttcccacatctggggtgtgtggggctgggcgccattttcgaggcccgggcccactgggctccactgacgggtgacaggtgactggctgggagcctcctggttgccctgggctctgtggagctgagggatcaaaggggtccctcctttaccccccacgtaggacagaggaaactgtcttcggctctcctcactcatccagtccgagtttgagccaattccttgacaggattcggccatcagtccctgcctttggggaaagccatcagtgtcaagtgcccgagtggcagaaacccgggtctagccccatcactggtctgttagggcagttattttctgctttttgcagaaatgggacaccagctccttattttccttttctggaggttatagttccagggaaggaggtaatgtgaggggaatgggcatttctgggggatcctgagcactccccacagggcatgagcctaggagttgcttgggatgacggtgtaggggcaccatggagggttgcacccatatgggaagaggagtccgcctggggctcaaggggctttatggatgttggaagtggccagctggccaaaactcagttctctcccttccgtaaagcttgcttttaaggacaactgttctagaatgtgtttaagaaacatgaatctattattttttatttatttatttatttgagatggagtcccactctgtcacccaggctggagtgcagtggcacgatctcagctcactgcaacctctgcttcccaggttcaagcgattctcctgcctcagcctcccaagtagctgggactataggcatgcgccaccacccccagctaattttttgtatttttagtagaaacggggtttcactgtgttggcctggctggtctcgagctcctgacctcagccgatccacccgcctcagcttcctaaagtgctgagattacaggtgtgaacccccgtgcccagcctattattattatttttaagagacagggtctctctctgtctcccaggctggagtccagtggcatgatcacctctcactacagcctcgaacttctgggctcaagcaatccttccacctcagcctttcaaagagctgggattacaggctgagccactggaggcttggttttcacttattttgggtgtatacccagaagtggaattgctggatcatatggtaattctatttttaagtttttgaggaaccaccatagtgttttccatggtggttgcaccattttacattctgaccagcaaggcacaaggattccaatttctccacatcctcaccaacacttcttattttctgcctttttatattagccatcctaatggatgcgaggtattatctcattgtagttttcatttgcatttccttaatgattagtgacgttgaacatcttttcatgtacttcttggagattggtatatcttccttggagaaatgtctatttaagtcttttgcccatttttgaattgtgttgtttgtttctttgttgttgcgttttacgagttctctatatattctgaatattaatctcttattatacatatgattttcagatatttcctcccattctgtgggttatcttttcacccctttgatagtgtctcttgatgcacaaatttaaaacattttaatgaaatcctgtttgtttcttcttttgttgcttttgcctttggtatcatatccaagaattcattgcagatccactatcatgaagcttttgtcgtatgttttattctaagaattttataattttaagtgttacatttaggtctttgatttattttgtgtatttgtatgtggtgttaggtaagagtccatctttactcttttgcctgtacataatccagttttcccagcaccatttgttgaaaagactgtcctttactcattgagtagtcttggcaaccttgtaaaaaatcatttttccatacattgtttctgggccctctattctgttcccttggtctgtatctttatgtgagtaacacactattttgattactatagctttgtaatatgttttgaaatcaggaaatgtgagtacaccagcgtttttcttctttttcaagattattttggctgttcagggtcccttgagatttcatgttagttttaggacgtgtttttctatttctgcaaaaaaaaaaaaaaaa

SEQ ID NO: 58393 - DNA, 932 bp, Homo Sapiens
gtgaagccgccctgagatgatggttgaggaagggctctacggctcccaagctaggccaaatgcctccggcggccgcgcccgggcgccccttcccctgtggggcaaccctagcttgggacgcgtgaaccacctccgtagctgccccaccagcacccccagccgtgcgcccctgcaccatgcagctgccctgcgcatggagccgcgagggacagcaggcccagccctcagcaccacctgcctgccaggaggttcgggaaactggcgccgcagcggagagggcatctgtccaacgcctcccccggggctcagctgcgggcccccaggcataggcacccatgacccttctgtgttgtttgtctttgtatagtctgcagatgtggatcctgactcctgagagaagtagctcaccgtgacgaagctgcgtttgcttttatcgatttgcaaatcaaagaagggggacatattgggagaaggccccccaaaatctggccataaactggccacaaaactggccataaaatctctgcagcactgtgacatgctcatgatggccataacgcccacgctggaaggttttgggtttaccggaatgaaggcaaggaacacctggcctgcccagggcagaaaaccacttaaaggcattcttaaaccacaaacagtagcatgagcgatctgtgccttaagggcatgttcctgctgcagataactagccagacccacccctttatttcaggccatcccttcatttcccataagggatacttttagttaattgaatatctatagaaacaatgctaatgactggtttgctgttaataaataagtgggtaaatctctgttcggggctctcagctctgaaggctgtgagacccctgatttccccctttacacctctaaaaaaaaaaaaaaaaaaaaaaaaaaaaaaaaaaaaa

SEQ ID NO: 58394 - DNA, 3451 bp, Homo Sapiens
agcgagcccaggcggcaggtgagagtggtgggggccagctgagcgccagagctccctcaactgtcccctcccggcccaccctcgttcccacatcctctcattttctcttcccaccccgttcctcgatgggaacgcagccacggccgccccgctgaaagccccggctggtttattcctgagaagtcggtgtgaggggccagggccggccctaacctccctggggtcctgactgggaatttctgccgttccccggctgcctcgtcccttgcgcagccggccctactctgaggccccggggacaccacgctgaggagaaacggctccgagcttgggatcggggagacctggttctgagacccggtcctaccagtagccaatcgttgtgaccttgggcctcagtccccgtgacgttttggtccctgggggttcctggcagcaaagcacgaaagccttggagtcggggggtacctgagctcacgattgtaatttcgaacctgcaacttgtccgaacccccagcgtgttgagttgatataattaagtatccagatcggaaggatgcttgttactagaacagacagctaggcctttgtccagaaggattgattgagtgggtctgggtgtggtccaggaatctcattttaaccactccctcgggtgatttgtaggatctgcaagttcgggaaaggctggtgcccttcattctgacattactgagtgccaagctctggatggctcaaggaggtcacggtctagccactaacagagcacttcacgggggtgtcatcagagaaggcttagtaggaagaagtaaacggtttttgggctaagagtaactgacgacaagagcatgtgattctgtcgattttgtgtttgcagtcagaccccatcattgtgtctgttaaagttgtgctttgcacaccccttgtcaaatctagtcctttcagaatatccggctcccccctgcacgggtgcggggaagacctcctaagccaaaacttaccccaaaggttaaaattttagatccatatttctggttttaggtaaaacactcctctccataaggatttgtttctgagttctatccatccatctttgaatgagcctttcctgtggaaactaacatttgggtatcctttctgaaaccctaattcctgacacacgccaaatgcctggagacgttcctgtttcattgttgattctcaccttttaaaaaaaattctgggccaggctcatgcctgtaatcccagcactttgggaggctgcggcgtgtggatcacttgaactcctgacctcaggtgatccacttgcttcagcctcccaaagtgtgggattacaggtgtgagtcactgcacccagcccagttagttaattttaattaggattttcctttctgataactgtcagtattcttggaactcttttatgcacccgagttaaagaattttttgaactgaagcccaaacttcagtgttattttttgcttttgtcccctttcaccagaagagagaccaaatgcctcaagatttgatgcttactgggcacctaaaaaacagtctgttctcagacatccgcttttactgcctgccagtaacattttagaagggccatgcacatgtgtgtgcctcagtcagagttggagaggtacccaacaagctcagtgacgtgacaatgatgctacctcttattatgaaactgggtcctgactcacagcttctaagcatgttgtcttagatactggacactttttccttacgggtttttttgttttaaaagacaaattcacaacagcaacataaaattctgatgatgaaaagtatcacactttggctttagatatttaaaagaatattatctcctattttatttgaaaaatgctgactgaaagtagtggctatgcctgttttttgagggttgatgtttaatgaatgtagttcataagctcctcttgccataagattagttttgggagatacggaacgcaaagcattttacattcttctaatttactgacacagtcccactggagtactgtccaaagatcataaagcgcagctcttacactaattctaacaatgaaaaagcaggttcccatcactccctggagtgtcctcctatcaggcatggctaaggagaagcagggttttataggactgcttgaagcaaaggcaggtaaactagccacagagaagtggaagcccagagttctagaacattactttacagagctctgtgtgccagagcctgccgagtgccttgcttatttttatcttctcatttgcttcttacagcagcctcgcaaaatatgaggtttttatccctactttactgatgagaaaacaaattcaaagagtctagtaacttatccatggtcatgtgcccataagatccagtggtaaatagaaccctaggtcatctgcactcaaaacctgtgccctataaaagcctccgtaaatgttgctgaaaaggtctagacatttggcttgttttctctagctaataagtaagcttttgcccttcgtttcctttatgagggtttttctgtaagtacagtgcaaagttgtggtagtctagtaggtggggtctttttcatccctttctattgtcccaaggaagaacctattccaacatcattctagaaacaggtcattttttttttcttataacttaatgcccagcaatccatactcccatcttgcctggctggttcttaaatgggagattgatcccatattgcacaccttgaagtttgcaagggttcttcctcgacatcatgtgccagttaaaagtttcagttcttgattgtgtgctgtttagggatttaaaaaccaaaattggccaggcacggtggctcatgtctgtaatcccagcactttgggaggccgaggtgggcagatcacttgaggtcaggagtttgagaatagcctggccaacaactctgttgctactaaaaatacagaaattagccaggtgtggtggcgtccacctgtaattccagctacttgggaggctgaggcatgagaattgcttgaacgctgaaggcggaggttgcactgagttgagattgtgccactgcattccagcctgggtgacggagtgagactctgtctcaaaaaacagaacaaacaaacaaaaacaccacagaattagctggatgccgtggctcacacctgtaatctcatcactttgggaggctgaggcgggtggatcacctgaggctgggagttcaagaccagcctgaccaacatggagaaaccccgtctactaaaaaaatacaaaagtagacgggcatggtggtgcacgcctgtaatcccagctactcaggaaactgaggcgtgagaatcgcttgaacccgggaggcagaggttgtggtgagccaagattacactccagcctggacaacaagagtgaaactctgtcctccccaccacccccgcaaaaaaaaaaaaaaaa

SEQ ID NO: 58395 - DNA, 3184 bp, Homo Sapiens
tgtagtcatttcctgttcacccctaacccagcccctaagcaaccactaatctacttcccatctctatagatctgcctattctgaatattttatataaatgaaattacacgatatgtggtcttttgtgactggattctttcacgcaccacaattctttgaggctcatccattttctatcctgtgtcagtgtttcattcatttttattgctgaataatacctcattgtatggatagaccacacttaatacgaacatttgaatattgatcaatataagagatttttgtttctttttcttttcttttttttttcagaaattgagtttcactatatagcccaggctagtctccaactcctgggctcagatgagcctcctgcctcagcctcccaagtatttgggactagaggtgggtgccactgctcctagctataagtttttatgccaatatatgttttatttctcttaggtatacatctaggccatatagtaactctgtgtttaacattgttagacattgtcgaatactgacagttttccaaagtgcacccttgcggcacccttttacatcctcaccagcgctatgtaaacaggtttcgaatttttccacattcttgtgaacacctgtcaatttcatcttttttattatagccactctagtgggtgtcaagtggtatctcgttgtggttttgatttgaatttccctaatgcactttgtccatttgtcttctttgaaaaaaatgtctatttggatcttttgcccatcttaaattgagttatttatcttattattagtgatttttaagagttatttatttattctgaatacaaattccttatcaaatatatgatctgcaaatattttctcccattctgtaggttgtcttttcacattctattttgtactgtttgctacacaaaagtttttaattgtgtaagatctaacttacctattttttcttttgttgcttgtgttttggtgccatatctaagaaaccactgcctaacctaagatcatgaaggtttacttctatgttttcttctaggagctttatggctttagctcatatatttgtgtctattatccacccggagttaacttttctgcgtggtgtgagaaaagcgctcaactttattcttttgcatgtggatattcagttaattccagcattatttgttgaaatgtctattctttactcacttaattgttctgacatccttgttagcaatcaattgtccatacatgttaaggtttatttctggaccctcaactctattccattgatctatgtctcctcttatgccagttccatgctgtcttgattattgaagctgtggacaaaattttggaattgggaagtgtgactcctccaactttgttcttcattttcaagatggtttttcctaatctgagtccattgtattttcatgatcagcttaggacaacaaatttttaaaagaatattcataaagtggagtggatccagaggacattagaagaaagattacaacaacttgtgatgtttaatctgcaagatgaaatataaaagtggaatgcaagagatgacttcacaggcttaaaatgttgctgtaatgtagaaaatgatttcagtgaattctttattgccccagatagttaaaatgatagaaaggtgaacataagctcagtataaggacgacctttaatacaactaaactcattcataaataactcacattttctcacacactggcccacccaaccttgaagagagtcaagtctaggcaagatgacctgttcatcaggaatgttgtagaagaaatgtcatcattgggaggaagaagatataactctttgatacgtgagcatgaatagcagtgagaaatggatgctgtcagtgactgttacctaattaatcgtccaaccatacgagatggatactattattattcattttgctagataaggaaaaaggctagcaacttgtctagcagcacacagttaaaaagtgacaaagcttgtccttgaacccaattctgtttgacaccaaagtccatgctcttactcggtatgatctggacaagagttgtagtggcagatagaggaaaagaaattaatatgaaagatcacatcaaggaaaagggacaggagccattgaattggctgaatgttgtcattgactaagagtatgttaccaaagatgagtttgaggtttcaagctttaataagtaggagagaagggaggatttattaataagaatatggaaggcaataggtaaaacaggttttggtggatgtgaaaaacaagctcatccattcaacaggcaactgtcgatattcagacttgggctcgggcctactggctcaagaagacatggtttgatccttcttctaggtgagtcaaggataactgattctgaggctctgaacctgaagttctagggaacagaagtaagattaacagaaagataatctgaaagaagacactctttggggaagaaactgatactcggtgttgtcgggtatgttaaatttgagctgacagtaaaacatgcaactatgcagaagacaattaagatgtgggacagagccttagatgagtagatgggattggccctcaagaggtggctgaagacaaagtattaaatctctaagccaaagattgtgaggaaggaaaatcagaggacttggcacttagcttttcatcctacaaccccactgtgcatcacctaaaacttgcaatgtgtacctcaaagatttcctaaagtcagtgcccacgagaaactagcttttagtgtttctttattcagaactctgagcctggcacctagcagagagcttttatatatagtacattatctggtatatgtaacaaagattgtatgcagttggtattctctccagtatatagatgaggaaactgaaattcagagaggttaaatagtgaaggaggccaaggtgggcggatcacctgagatcgagagttcaagaccagcctggccaacatggagaaaccccgtctctactaaaaatacacaattagccggcgtggtggtacatgcctgtagtcccagatactcgggaggctgaggcaggagaattgcttgaacccaggaggcggaggttgcagtgagccgagatcgcgccattgcactccagcctgggcaacaagagagaaactccatcttaaagaaaaaaaaaaaaaaaa

SEQ ID NO: 58396 - DNA, 2827 bp, Homo Sapiens
gttatcccagcactttgggaggccgaggcgggcagatcacgaggtcaggaaatcgagaccatcttggctaacaagaaacaatcagctatgccttgggatcaagatccagaacaatcaactggaaattacagtgaagatgaacaaaatggaaagcagaaatggagagaagaaggagaagcaggcagaaagagagaacgagaaaaagaagaaaaaaacgaaaaggagctgcaagatgaacaggaaaacaaaaggaaaagggaaaatgagaaacagaaacagtatcccgagaaaagattagtcagcaaatccctcatgcatactctctgggcaaagtttaagttaaacaggtgccccactatacaagagagtctatcactgtcatttgaatttgacatgacacataaacagataagtcaatggttttgtaaaacgaggaagaaatataataaagaaatgtccaagagaaagcataagaaaaaacatatgagatggagatctctgtgttgccaaggctggtctcgaactcctgccctcaagtgatcttcctattttggcctccagaaatgctgtgattacaagcatgagccatcgcactggctaagacattttacatgacaccattctcaccaataaatggagttctgaaaggataaacaagaaaacattaacagtcgttgattccgtggagtagaactaaatgaggggtatgcaaaggagtttttatgtgttttatttttaccctactgtagatttaaagtttttataatggatgttaattgattttatttaagaaaaaaaatcgagtcaaggctgggattacaggcatgaggcactgcacctggcctttttttttgagacggagtctcgctctgtcgcccaggctggagtgcagtggtgtgatcttggctcactgcaaactctggccctcgggttcaagtgattcttctgcctcagcctcctgagtagctaactaatttttgtattttcagtagagactaatttttgtatttttagtagagacagtgtttcactgtgttggccaggcttgtctcgaattcctgacctttggtgatccacccacctgggcatcccaaagttctgggattacaggcgtgagcaactgtgcccaaccagttatactattttcaatcctatataatttgtacagctgaagtggcaactgcttgcttttaaatgggaagagaagatgtccccatttaatgcttagaaaagattgacttcggtttaagccaaaggagcatcctggagaaccgaatgattcatgattagtaattctcaaggaatggccatgtggctcttcatagcgttggcccttgggggggtctactttaatctttgttctaacccccgccgcccctgttgtccttttaatcctcatggatcaggtgcgttcacagataaccactaaagtgaggctgaaagaggttaggatggggatggacacctgtatttctgagaggacctctccatgatgtttaggaatggggttgacatccttcacctagaaggtcctttcccaagattggacattgattttggtcgctggagcagcctcatcagcatttctacaaggtccccagaagggaggaagctattcattgaatacttcatatggaggtggttttatgttatttttatgagatattaaggaatcttcagaaactcatagcatctccatgttgcagataaaagaggctcgatggaatgggagtgagtcagttcagagttactctgctaataataaacgtgctggctttgaacctacgtctctctgagtaataagcccctgccctctcttccaaagcacattccttcccttgaatcagagagcactagatgggaagggtgatgggagctacattatcactggcagatggaactattcagctcctgtccttccattctctaagaaccatgcatgtgtgtaaacacatgttgcatcagtgattgttccaggctttgcctacttgctcccaaacatgtgaaaaagaagaggaagattaagtaagtcattcatatattacttatatctgagtgtttgcaatcatataggggagcatagttcccacaaggaccggtttttgtaaacttttgcttctctttcctgtatttaggcattatatagctatggcagtgatcacccacaggtacaaattctgtatcattcattgcctttacttggaggtttacaaatatttttagtctctacttctttttcaaacacaatcttgaaacctcaacatatgaaacgaataaaggaaaattttgttagcataatgtatgttagatttcagcgtgtaatgctgacttataaaatcaagaagaaagaacaatgaagctttgtgatgaacacagaaatttgaaagcagtgttagagatgacagctgcaatcttctttaacttcagtttccaatttattgccttttgttgttaggtatattttttatgttgttgtgcagtattgagaaaaccctgattccctaaaataaggagttgcaaataataatgagttgttttatttttttaaacagttaccttgcaagctcgggatgttttcctttaaacttatccacttaaaacgtgttcacttaaaacaaaaggaagaaaagaaatggcttctttcaaagctgatatcgctaacaatgtgaaaccatttacattttttaattggtaagcctgcgatttggaggaccaatgatagcttcctctagcctaaatcttccattagagggagaaaacactttttaaattataacattaatgagatgctcattgatgtacttaaaaaacaaaaaaaaaaaaaaaa

SEQ ID NO: 58397 - DNA, 2224 bp, Homo Sapiens
agcgggtcacctgcaagtcccagctcgctccacctacagaaagagaagccatctcagtatgatctttatgaacatagccgacctttaatgacttctgagaggaatggagtttccttgatgagcctgagagctgtgccccgtgatgcagagaactttgcctatataacctcgccaggttgttggtgtggagcaaagggaaagcagacaccctcagtgaagtgtttcagtagaaagtgtcacagctaggtccattcatccagaaggctcatccctgtgagatgtgtgttctggtcttaagggacattttgtatctggctgagcaacaaggaacgctatctgggcagaaatagtacacttgtgaggcatgtgggaaacaattctggtttagtgcaaacatgcaccagcaccagaaggaacacaatggaatagagacgtggacaatgctttctctgtgaaaggctgcagattttaagtgtcaggaaggccttttgcctgtgggaaagttgggaaggattttcctggcaactgtaccttctccaacataggccactcacaactggattgaagccacacatcagcaccaaatgtggggaggcctttcacagcagaaaaagtcattacaagtgcagtgaaccaggaaagctttcaggtacaaatacaaacttgttcaacatcagggaattcacaatggagaaaaggccttaggagtgtggcaaatgtgggaaattatttagccaaaactccaatctcatttgtcactggataattcacgctggagaaagacttatgagtgtggtgaatgtggagaatttctttagccaaagctctgtcttcattgaacactagagaattcacactagagctaggcctcatgtgtatggtgaatataggatgtcctttagccagagctccatccttagttaatcacagagcgttcacactggagcaaagccctgtgaatttggtaaatatgggaaatcccttcaacagaaagccctggactcaatcaacactggagagtgcatgctggagaaaggcttccatattcactataacaactcaggaggaaagcctctgtgaatgtaaaggaggcatcgaactccatacatctgaacatccacagtggagaggttccccacaaattccagagacagagtctcattacattgcccatgcctggtctctaactccaagcctcaaggccatcctctcacctcagcctcccaaagcactgagattacaagcatgagccgctgcacctggcgaataccacatttttggaagaaaagcttactttataataaggaatctgagacccagagttgaagcaaattgcccaaggttacacagctggtcagtagcagacacaagatccaaacctggtttgtctgaatccagtgctgacgtccttgtgcctcacctatccgccaccgccaaactgcttcctgttcttccagttgtcactatccttgactcattgcactttgacctcaatcaatcttcttatcttttcttaaaagaaaaacatgtttgctgtctaatcttttcaactattatccagtccatttctctttccatgtaaccttggtcttcagtccatgacaatatctatcttctcacagatcatttcagctgttcagtttttgtgccttctaaatttactcacactaaatattgtcctgaaaaattcaaaatatttctccatcctttattccctggtgctcacctgagtattttgcattattaactacttctttcttcttgaaagtatttctcccacaagagctgcaaacctgtgttctcccagcatgttgccatttcaccccagcagttccttttctgtcttttttgccagttccttcatcagaaacttctatgttctgtgcatgccattagaggagctgaagttttgtttggttccttgttttctttttgtcttctactattattccctttcaatatgacccctcaatttactcttcatattacaattttaattatcatcctagagtacaaatatctattttcctgttttaatttctcaagattttgtcaagacctaatttcaaattaatgttaaagacatttgcttagcggcttaccaacaacgcgacaagacacattttacacagtctcctcatacactccttccctgctgagccagccacctttcccagtaaagaaggtaaagaagatataaaaatgaaaaaaaaaaaaaaaactc

SEQ ID NO: 58398 - DNA, 2177 bp, Homo Sapiens
ggcacgaggggcccgcggagtccagcgaagtttggcggaacatggcggaagcgtctggggcacgcaggagcgcggggcggcggcggccggagcccgaggagctgtagcagccttagtcgccgccgccgcggggcgaggtcgccgccatggcccgctggatcccgaccaagaggcagaagtacggggttgcgatctataactacaatgcttctcaagatgtggagctctccttgcagatcggtgacacagttcacatcctggagatgtacgagggttggtacagaggatataccctccaaaataaatctaaaaagggcattttccctgaaacatatatccatttgaaagaggcaactgtggaagacctggggcagcatgaaaccgtgattcctggcgagctccccctggtgcaggagctcacgtccactctgcgagaatgggctgtcatctggcgaaagctctacgtgaacaacaagctcaccctcttccgccagctgcagcagatgacgtacagcctgatcgagtggcggtcccagatcctgtctgggacgctccccaaggatgaactggcagagctcaagaagaaagtcacagccaaaattgatcatgggaacagaatgctggggttagatctggtggtgcgagatgacaatgggaacatcctagaccctgacgaaaccagcaccattgccctcttcaaggcccatgaggtggcctccaaaaggattgaggaaaagatccaagaagagaagtcaatcctgcagaacctcgatttgcggggccagtccatcttcagtaccatccacacctatggcctctatgtgaacttcaagaactttgtctgcaacatcggggaagatgcagagttgtttatggccctctacgacccagaccagtccacttttatcagtgagaactatctaattcgttggggcagtaacgggatgcccaaggaaatagagaagctcaataacctccaagcagtgtttacagaccttagcagcatggacctcatccggccccgcgtcagccttgtatgccagattgtccgcgtgggccatatggagctgaaggaaggcaagaagcacacctgtggactccgaagaccttttggagtggcagtgatggatattactgatatcatacatgggaaggtggatgatgaagaaaagcagcattttattccctttcagcagtaagtactttggcatgtgtcccaggtgacttgagacctggattagccattcaattgtcttttaacacagaaacaggtgttagaaaccattttctcagagaaggaaagattctaagctgcaagattgtcagataggagctgaacagaagactttattcaaagtccttgatgttggactcccattgaagagggtaaactgaactttcctgattctatagaaagcatcaaaggaatataaaagggcacatatctgtctgctctggaatgcagagagggtgccgtccttgtgtcagcaatgccaaaatatatgtgcagtctattgcatgaaacaggcatcatggatgacacggaatcacgtgggctagcatagggcttctcagactgcatcatgcatatgaatcaggggaacttgttaggctgcaggggagttctgcctctgacaagctcccaggtgatgctgatgtagctggtctgagggccacactgtctgtagcgagggtttaggagatgagagagtgaagggctgacccacccatgggccagtgttcctgcatgttgggggaaagccagcctgggagcatgtgaaaggatccttgcagagctttactgaggccctccatattgagctgcaggagctggagccatgggtaggccattgaggagctgttgggagcagattcaagccgtgtcactctgaagaagtgcaggtgtgaacgtcatgacctgctccagcacctgcacaggcagtggaggcctagtggaggccaagagcattgccgggaccaagtcccaccaggggccatcgtgccagtcagagggcatcatctcagctcacttgcagctgccactgcagacaagtagaacaaactgagaattccacaaaccagccagagtcatatatttgagttaatatatcactttttacaaatgatatcacaaattagtggagaaagatacattatgcaaaaaaaaaaaaaaaaaa

SEQ ID NO: 58399 - DNA, 1809 bp, Homo Sapiens
accgtgtgatgacacagagggaagatggccaaaaagaggggcctcaggagaaacccaccctgtggataccttgatcttcgactttcagcttctagagtcatgagcaaatattaatgaatgcctgtggttcaagccacccagtctcttgtactgggttacagcagccctggctgactaataagggagcatacagtatcagaatctgcacaagggcatgcttcatctctattctctattataatacaatgcttaaatatgaaaaaatgatggcaagaaaaccattacaaggaagaaacccataatgactggcgaaatccatacggagagtggagctgtatcagaaaatgccaaagtagtcatgatgggtcaggtttattgagaagtcccagtgggctgaatgcagagctcagtgtctcacatacattttccccttttgtcctcaccacaatcctgtgagctatgagctgttgccctcttcatcttgtaagcaaggaaactgaggcaaggaagttaagtgacatccacgagatttcagagccagccagggtcagagctggaattccaaggcaggtatcactctgcagacctaagttgtttctttgacagccctaagcccttgggaggttgggggccagagaggggtggttgtaggatctattacgataattggttaaaagatattgggacacattgccttaacgatgttttggttccatctgcagaaagaggctataaaacgtattgagtagagtgaagatgtcactcgtaaaacaatgagtatcactcatattacagagccctcaggatctgtgagccctgatccaagccctgtacatacctgcctatttctaactcacagaggcctgagcagcttccccagagcttctgggagttctgcacccaggccgtctgactccagcacctggacctctaaccactgggtaggcactgccttccctcacgagcccagcgcctgcctagcatctgcttctgtcacagtgagggaaagatggtggctgccatttgagcttttaaaacagaaaaatactttgtcccccaaatttcctccctttattacaaacatgatttatgataaatgtaaagaatctaaaaaccaaatcaaagctagaataaacattatctgtagtgccaccccctaaaaagaattacttctagtatttttgtcagcttttctagtcctttttccccctatagaaatatacttaatgcagccataaatatactaataagtttataggcagcagcactcattagaaaagagcaagagctttggaataagacttgggtttaaatccatttactagttgtgtgtatttggacaagttattttatttccctgtgtctccatttgctgtctgtaaaatggggataataacacttcattggattttgcagtagcctagcatatgtaatgtgcttattcctgtcagctggcacacagtaagtactcaaataactttaaaaagtagcagttttgggctgggtattgtggctcatgcctgtaatcccagcactttgggaggccaaggtgggtggatcacgaggtcaggagatcgagaccatcctggctaacatggtgaaaccccatctctactaaaaatagaaaaaattggccgggcatggtggcaggtgcctgtagtcccagctactctggaggctgaggcaggagaatggcgtgaacccgggaggcaaagcttgcagtgggccgaggttgtgccactgcactccagcctcggtgacagagcgagactccatctcaaaaaaaaaaaaaaaaaaaaaaaaaaaaaa

SEQ ID NO: 58400 - DNA, 1698 bp, Homo Sapiens
aaataaataaataaataaataaataaataaagtttaaaatccataggtgtttggtatactcacaatgtcgtgcagccatcaccacgatctagttccaaaacgtttccaacaccccgacaagaaactcccatacctgtcagcagttaccatttgtcctccctcctgtacccccggcaccccgtaaccattcatctattctctgcatctattctctgcctccatgcgtctcgggaatcatggattacgtgaccttcgtgctgtggcttctctcacgtagcacagtgtttgtggggctcacccacattgactcatgcacctgtctgggccgcattcttttttatggctgaataatattccctggtatgggcataccaggttttgtgtatcctttcatcagctagtaaacattcgagctgtttccacttttttggccattgtgaataacgctgctgtgaacattcgtgtacaaatgtttgtatgaatgcagttttccattttcttaggtgcaattgccaggtcatatgtagtcactctgggctttgctttttgagtctgttgtattttatttatttatttttttatttttgtgggtgcgtatatttatggggtacatgagatgttttgatacaggcatgcaattcataataatcacattgtggagaatggggtatccatccatcacagatttattctttgtgttgccaacagtccaattatacacttttagttattttatttgtttgtttattttgagttggagtttcactgttgttgcccaggctggagtgcaatggcgcgatcttggctcactgcaatctccatctcccgggttcaagcgattctcctgcctcagcctcctgagtagctgggactacagctgccatgcctggctaatttttgtatttttagtagagacgaggtttcaccatgttggccaggctggtctcgaattcctgacctcaggtgacccacccacctggcctcccagggtgctgggattacaggcgcgagccaccgcgcccagttgcttttagttactttaaaatgtacgattaaattatgatcgactatagtcaccctgttgtgctgtcaaatactaggccttattcattgattctatttttttgtagccattagccgtcgctacctccctgcattgttgcattttggcctcttatgtgtaagtcccgtttgttctccagaatgctgcttttaacacccagcccgttccatctctctctcttctgccttgggtgtcatgctgtctcttcctcagatttctcctggggtgcaggtgctcccctgcgaaccactgctgtgcacaaagtgattttgtgctcaggcaggtggatcgcttgagcccaggagtttgaaaccaccctgggcaatacagtgagaccccatctctacaaaaaaaatggctgttgtgcagtttgggatgagagttggttgcccccgcggtcctcccttcccccaaccccacctgccctccttgctcagcaacaagggacccccttcactggactatgaagcctgagggttgtctaaatcaatccttggccaggcgcagtggctcatgcctgtaatcccaacactttgggaggccaaggcgggtgcatcacctgaggtcaggagttcgagaccagcctggccaaggctctgagagcagcgagactccttctcaaaaaaaaaaaaaaa

SEQ ID NO: 58401 - DNA, 1600 bp, Homo Sapiens
tacagtctcgtgactcttttcatattaaactgttatcatgactgacttacttatctaggggctttctcttaatcaacacaggttctttattcctggatggtatccaacattccctgaataaccagtgattgtttattggctgtttgactgaatatagaatagaataagtctgtagcttatagtccattctaaccactcattcttttcataacttttattgagtgcttactatgtgccagcttttgtttaagagattggcaatactatagtgaacaaaatagtacctgcccaggcaattaaaaagtaagcaattagacatacaatgttgggtagcattatgtgtatattaatccagtttcactctgctgataaagacatacctgagactgggtagaaaaagaggtttaattggacttacagttctgcatggctcgggaggcctaagaaccatggtgggagatgaaaggcacttcttacatggcagtggcaagaggaaaaacgaggatgatgcaaaagtggaaacccctgataaacccatcagatctcgtgagacttattcactaccatgagaacagtatgggggaaactgccccaatggattcagattatctcccaccgggtccctcccacaacacatgggaattatgggagtacaattcaagatgagatttgggtggggatacagagctaaaccatatcacagtgttaggaagaaaataaagagggataaggaaattctagagcatatgctcaagcaaggcatatctaaagagggagcctttgagcagagacctgaatgcaatgagagacaagttgtgtccatggcggtgttgctggggaggtggttctgggcagagagaacagcatttctgtgctcctattatgtaccaggctctgttctaggggttctggagacagcaatggagaaggttgttaaacatcagcattgtttattatttaaccatgcagtctgttctttttcaatattatgtcatagttcaaaactcctcctttctttaattgctaggtttaacgaagttgaaaaaccctaacttgggaaagtctctttgttctccccagctgctaatcacttcctactctttgttgtggaagagaacacataaagtcttattatttagaggcccctaacagaataggatactggtcctggggacagatccccaactatctgaatttaatcatgatgctcagggatgtgtgaaagtgtcttaggtgttcatgtctttgacgtttgacctaggttatagatgtctgtgaaattctgtcaccataattagatatagatactactgatttccttttcccagtcttccaacccagcctatgaccctgagtaaaaccttcttaaattcttttacttcagtagcacacaaaaaatcataattttggatcctgttccttgctctgtcacctgcttgctgcagttaagtctgctctgtggcagttttccatttgcaagcagggcacccttccagttaagttgtaaaattttatgtttaagtaagcccctgtgcccttgaagaataggagctacaggaatgtagagtccaaaaaaaaaaaaaaaaaaaaaaaaaaaaaa

SEQ ID NO: 58402 - DNA, 1451 bp, Homo Sapiens
ggaccctgggccactgcaccccaccaggacggcaggactgaaaaggccactgacctgctcatctgacacctgagggccgctggagacccagggacactcctgctgcggctcatgtttggaagctgtccggaggcgggacttcctcttcctccaggggccgccgtccggaggcgggacttcctcttcctcggggacaactgtctttttctcttaaggccttggactgcctggatgaggctataatatggtcagtactctgctctacccaaagtctcctgattgaaatattaacctcatccaagaaacaccctcacagcgacgtctacactggtgtttgaccaaatagctggggaccgtggcctggtcgagctgacacaaaagtaaccatcacagctgctgctatggtctgaatgttgatgtcacccccagattcatttgttagaacttaagccccaaggcgatggcatcactggtgggctttgggagatgaggaggatatgaatgggaccagtagcctcataagagttttgagggtcctggttgcccttccccaccctcccgtccctgccactgggtgaggacacagcaagaagccgccgtcctgggagcagagagcagaaagcagccctcaccagacgctgaatctgctggggcctcggtcctggacgtcccagcctccagaactgagcgatgaaattctggttacaaattgccccctctgaggtattttgttttagcagaaggaacagacgaggatgaccaccgaggcccttctcaggctgccgcgggtctccaggatggggacagtcagctggggccaaccgagctgcatgtggtcaagggcccatgcatgtgaccagggcccgcctcccacgtcacccagtgcaccctcagcatgggacacggacctagacactgccggggtctccgtccttgcaggcactgccaggcgcccctccctgggagaagctgcagctctgaggctacggtcttgcaggtcagccaccacctggctttgtggtctgttatgcccggcctagtgtccagggtggtgacatttatttgaacaaagaccagtctccaccaccaaagtcatggctctgctgttgcttccagaaccaaagaaaggctggcttctgggctgggcgtggtgattcacgcctgtaatcccagcactttgggaggccgagacgggcagatcacgaggccaggagttcgagaccatcttggctaacatggtgaaaccctatctctactaaaaatacaaaaaaaattagctgggtgtggtggcacgtgcctgtaatctcagcaactcaggaggctgaggcaggagaatggcttcaacctcggaggcggaggttgcagtgagccaagatcgcaccactgcaccccagcgtgggcaacagagcaagacgctgtctcaaaaaaaaaaaaaaaaaaaaaaaaaaaaa

SEQ ID NO: 58403 - DNA, 1389 bp, Homo Sapiens
cacaaacacacaaaattaagattaaaaaatattggaaacgacatatccccaaatgatagccaagcacttcgtttgcagatgcggtctttggcgcttcctacagatgtgccagcttgattcctaccaagccctaccaagcaggagttaatactctccccatttcacaaagggggaaattgaggcacagagggcagcacgtgggatgcaggaacccagaacccctagtcctttcttgggctcgacgggatggaccagcccctggagggggtccaacccctcccaacggcctgggaagccacggccaggctgggcggaaccgtgggtgtccctggcgccccaaggtgccaattaaatattcgtggccgtctggggccagagctgtggaccgcggcatggccgagccggggccggagcccgggcgtgcctggcgggtgctcgccctgtgcggggtggccgtgttcctggctgcggcagcagccggcggggccctggtagcctggaatctggccgcctcggctgctcggggacctcgctgcccggagccaggggccaatgccacggcgccgcccggggacccgccgcctggggtcgacgacctgcggcgccggctggcagaggctgccgagcgggaggaggccctagccaggcagctggaccaggcggaaagtatccggcacgagttggagaaggcattaaaggcctgtgaaggccgccaggtaggtgggccgggtagagggggagctcgggaatccagaatgttgagataagagacggcctgcccacacaactccagggttccctccctgtgcctcggtttccccagttcctcgaattgagagggtattgagaatagcgccctaatgccttccaacccttagatgtcagctcaccatggagtctaccttctgatccacctgcctcggcctcccaaagttctgggattacaggcatgagccaccatgcccggccctaattttttttatattttgtagagatgggatcgcttgagcccaggagttcaagaccagcctgggcaacatagcgagaccctgtctcaaaaaaacaatcaaacaaaaaaaattaaaattagccgggcgcaggggctcacgcctgtaatctcagcactttgggaagccgaggtgggcagatcatttgaggtcaggagttcgagaccagcctggccaatatggtgaaaccctgtctctactaaaaatacaaaaattagcctggcgtgatggtgaacgcctgtaatcccagctcctcaggaggctgacgcgggagaatcgcttgaacccggaaggtggaggttgcagtgagctgagaccgcgccactgcactccagcctgggtgacacagcgagactccatctgaaaaaaaaaaaaaaaaaaa

SEQ ID NO: 58404 - DNA, 1309 bp, Homo Sapiens
agcagctgggaagtctgctaactttgtgagcccaacctggagaggtctgatgggaatggttactggggagggcccccaccatcctgagctctgggaatcttgtgtgttcatgctgcagatggacttccaggacttgggtctagtgttgctgagggtggatctgcagaggtgagagaaatgacccctttggacttgggtctagtgttgctgaaggtggatttgcaagggtgagagacgtgacccctttgccctcgtttgcagctctgcggccgtcacgatgttctggaagtttgacttgaacaccacgtcccatgttgacaagctgctggacaaggagcatgtgacgctgcaggagttaatggatgaagatgacatcttgcaggagtgtaaggctcagaaccagaagctgctggacttcctgtgcaggcagcagtgcatggaggagctggtgagcctcatcacacaggatccgcccctggacatggaggagaaggtccgcttcaagtatgtaccaaagctgtgacgggccagtacgccaggcagtgctgcaggcaggccgcaggcagtgtctgaggatggccatagttggggatttctgatgaagaagcgagccgtaaaaatccaccccatgtgagaagtgaggagggcactcccatggggtctgaggttgaagagtttggagattgggtgcagtggctcacgcctgtgatcccagcactttgggaggctgaggaggttggattgattgagcccggaaatttgagaccagcctgggcagcatggtgcgaccctgtctctattaaatttttttttttaaattagccagatgtggtgttgtagacctctggttccagctactcgggaggccgaggtaggaggatcgcttgaacttgggaggttgaggctgcagtgagccatgattgtgccactgcactccagcctgggtgacaagagtgaaaccctgtctttaaaaaaaaaaaaaaaaaaaaaaaaggccgggcacagtggctcatgtctgtaatcccagcactttgggaggccgaagcaggcagatcgctaggtcaggagattgagaccatcctggctaatacggtgaaaccccgtctctactaaaagtacaaaaaattagccgggcatggtggcgggcgcccgtagtcccagaggctactgtactcaggaggctgaggcaggaggttggtgtgaacccgggaggtggagcttgcagtgagctgagatcacaccactgcactccagcctgggagacagggcgagactccgtctcaaaaaaaaaaaaaaaaaaaaaaaaaaa

SEQ ID NO: 58405 - DNA, 1227 bp, Homo Sapiens
aaaccagctgctgaaagctggcggggtgggtctcagacttcaggtggcataataaaataagaaggaatgactcatgctgggacaccgatggcccgtgaaaacatcatgctaggtgaagggagccggagatgaaaggccacattcggatgtctgcctgagccccaccccgaatgccagcccttcttccctgagctcacccagccccagctccaggactgagagccccaggaagcttggagaggtgtgagagagacaggtgtccagcctcagccccgctccttcacctgcagagcccggcatgtggggctacctgtcgctgatgcctgtcttcctagctgtctgggctatctctggcgtctggatcgtttttgccattgcagtgaccaacaggactgtggacctcagtaaaggctttccctacatcagcatctgcggatccttcccccctcagagctgcatcttcagccaggtgctcaatatgggagctgctctggccgcgtggatctgcattgtccgttaccaccagctccgggactggggcgtcagaaggtggcctaaccagctgatcctatggacgggtcttctgtgtgccctgggcacctccgtggtaggcaatttccaggtgagacccagtcggcgcccagggtctgtcccggccggcgtctggaactacaactcccagcatgccccgtggccataggcttattgtctcgggggctggttcccgcccggccctcctgggacttgtatttttctctggccagtggccttggaccggctggattcctttgctctctgagtggggcactacgagcgaggctgtttgtatgtaggacttcgctgacttccaggacgttgggataattttctgccagcccctctccccagcttatttaatgatgaaattactggtccaggcgcagtggctcatgcctgtaatcccagcactttgggaggcggaggcaggcggatcgcctgaggtgaggagtttgagaccagcctggccaaccaacatggtgaaaccccgtctctcctaaaatatacaaaaattagccgggcatggtggcaggcgacttaatcccagctacttgggaggcagaggcaggagaatcatttgaacctgggaggtggaggttgcagtgagccgagatcgagccgttgcactcaaacctgggggataagagtgagacttctctcaaaaaaaaaaaaaaaaaaaaaaaaaaaaaa

SEQ ID NO: 58406 - DNA, 1219 bp, Homo Sapiens
agcggggctggagcccaaccttattttccacaactaattatctttttaatcagcctgagccctgtatgtttcctttatctcttgacttgtcactgaactctgccctacatcatttagattcatttctaatggcttgctgactaatctaacattcaggtgagtatcgttgggctgctctttatgtacgtgtatgcacaaggtgaatgcgttttccttcttttaatttcagaggtgaccgcgccatgttggggcctttgacccaatagatggacacctcatggagacagtgagcaggaaagcaaatgtaggatgatcagtatttgggataatgagttgggagaaccagaagctttgacctccggatgagaacaggaacttgaatgttgttgactgatgggatctttatgctgctgagccattagcaagatgatccctccccctctgtaaatcctatagttgctggagtagaaagtggcatctggaatactgtttggtcttgatttctgcagctctaggaaaaaaagaattttagacttgagggaattcagtgcaagcaactgaaatgattaaggagttgaaggggatcaactccaggggagaaatgttacgaagataaaatatgtgtaactctagtttggggatgtagctccaatacctgcagtttacagatctcacaggagttctaaacgtttgccagcttgtattgcacagctcccattcattccaattgtatagcttgggaagatagctacgtaacttcctcaaggtcactcagcctgactctgagccaagaaacaacaggaggcaaagggaaagctttggagcttagacccaaggaccaaagagaaggtgaaaatccaggagtttgcctggtagtaaaagtggacacatccacttataacgctcacttgaaatagggagagttggctgggtgcgatggcttatgcctgtaactagcactttgggaggccgaggtgggcggatcacaaggtcaggagtttgagaccagcctgcctagcatggtgaaaccccatctctactaaaaatacaaaaattagctgggcatggtggcatgtgcctgtagtcccagctactcaggaggctaaggcaggagaatctcttgaacccaggaggcggaggttgcagtgagccgagatcacgccactgcagtccagcctgggtgacagagcgagactccatctcaaaaaaaaaaaaaaaa

SEQ ID NO: 58407 - DNA, 1104 bp, Homo Sapiens
gtggctcatgcaatagattagagtctagcgctttgggaggccttggcaggaggatcacttgaagccaagagtttgagaccagcccgggcaacatagcaaggcctcgtctctaccaaaaatttcaaaaatagctgggtgtgatgggtggagtctgcttgtagtcctggctactctggaggctaaggtagaaggatggcttgaactgcagtgagctatgatcatgccactcactccaccctgggcaagagtgtgagaccctcacagagattttttttaaaaaatgtaacattaaggctgggcgcggtggctcactcttgtaatcccagcacttcgggaggctgaggcgggcggatcacgaggtcaggagatggagaccacggtgaaaccccgtccctactaaaaatataaaaaattagctgggcgtggtggcgggcgcctgtagtcccagctactcggagaggctgaggcaggagagtggcgtgaacccgggaggtggagcttgcagtgagctgagatcgcgccactgcactccagcctgggcggcggagcaagactccatctcaaaaaaaaaaaaaatgtaatattattttattgaaactgaaaagtataaagaaaaaaatgtttctttgttctaggaccccagattagcctctgttaactttgtatgcgtgtgttggtgtgtaggggggttggtaagcaaactatatttgaagaataatgagaagaataaaagctgctaacctgtttctctttctccaaaaacaacgccataacatctggtgtgtgtagaaaaaagatggcgggccgggcgcagtggctcacacctgtaatcccagcactttgggaggccgaggtgggcggatcacctgaggtcaggagttcaagaccagcctggccagcatgatgaaaccctgtctctactaaaaatacaaaaaattggccgggtgtggtggcgtgtgcctgtagtcccagctactcgggaggctgaggcaaaagaatcgcttgaaatcgggaggcggaggttgcagtgagccagcactgtgccactgcactctagtctcagcaacaagagcaaaactccatctcaaaaaaaaaaaaaaaaaa

SEQ ID NO: 58408 - DNA, 1069 bp, Homo Sapiens
ggggtgcgtgaactgctttgcctgttctacctgcaacactaaattaacactcaagtaagtgtacggttttgtccagtgtgaatcctaagactgaaaactttggggagacacttaaaaaaaatcctagaatttagaaaaagagaattatttgatttcttatttcctctttctgttcaggccttctgaaagtaaaggttcttcctttaactgttccctgttctttcttctattccttctttgtcctactcaaagggataagtttgttgaaattgacctaaagccagtctgcaaacactgttatgagaaaatgccagaagaatttaagaggcgacttgccaaacgggagagagaagcaaaggataaggacaagcagaaaaagaaaaagccagtctgtttgtaaacttttctatccctgtgtcatcattttcactgctttctcctttggttagtcctttggaatatgtttttgttctgtttctgtcttttgctttcttccccccctgcaacttttgggcatgtatttgtagtcatcagagattgaaatacaagtatttgtcctatgtagaactggtccttttgcataactgctaaaattacaaaaattaaatgaatacactccatacttaatacagttttgtggtcatgtatttcacttactctgtagactcactcacctcattttttaaacaccatatagtatacatttctttcatttttttttaatggatttaaagggaagaattctaatctcttaatagaccctggaaaacattttaaaggatttttgtctgattaactgtagcttttaaaatcctggtttttggtttccttgccacgatcatttaattgataaattataagtgttgtttgatatttttaaaaatgcatatattctaagttatgtattaaattatttcagcatggcgaggcatggtggctcacgcctgtaatcccagcactttaggaaggcagagtggaaggattgcctgagcccaggattttgagaccagcctggactacatgcctagaccccatccgtcaaaaaaaaaaaaaaaaaaaaaaaaaaaaa

SEQ ID NO: 58409 - DNA, 1058 bp, Homo Sapiens
tcttagtgagtccaggatgctataacaaaataccatagactgagtggcttaaacaacagacatttatttctcacagttctagaggctcagaagtctaggatcaagggcttgcagacttgggcctggcagactgttttgatgctgatgaaagactgataaccatatggaccactaacatataccttaggtgtcttgataccccttacaactaaaccctgagaggcttacagcatccgtttataagaccctcttcaaaagcacagctttcttttagagtagattgcattttgtcatttcatcaacacatatgctttataacctcatcagaagtggtgtctccaatatcctccagaggtatttgggtgtgtttaacggccagaggatattggcagatctcattttctacaggctttgtgctacagaggcttatcttgaggagggccggtggcatccaggtgatgcctgttcctctacagagaatttaatacatcaattttatgtgttcagcaatttaaaggaagacatgaacataatgagggaaaatggacagtatgaaaaagaaacaaatgaagcctctagagttgaaaaatgttgtttctgaaatgagtatttcactggataggattaagaacaacctagacattgcaaaagaaaagcttagtgagtttgaagacagtgacagcagtaatttaaactgaagcacagggagaaaaatgactaaaaaacaaataaacccttggtgacctctggtacagtagtagcaagcagtctaacacatgtctaagtgagttcctaggaattgggagagggaggagctgtcaaagaactttaataaacctgaagcaagagtaacacagaaagtcacaccaagccagataatattcaagttgtcgaaaatcagtcataaatagagaaacatccagggaagaaaactaaatatagtagttcaaaagataggaatgactgctggttgttcatcaaggacaaatgccaccccaaaaccaatgaaatgacatttttaaagtaccaaaaaaaaaaaaaaaaaaaaaaaaaaaaaa

SEQ ID NO: 58410 - DNA, 722 bp, Homo Sapiens
cccctctttatcattaatgcaggggtcatctgaagacatagcaggctgagtttggagtgggatggatggagcgggagacataagaccaagctgtggtggctggaggctggatgaggggcacagtgatgacaggcaaggccacctcctaccacccggtgaaaggtgaaggctgggcctcctgttctcaggaggtagctgccaagcggggacccgagtctgccggccttctgagcaaggagctcaccgctgctgagaccctcaatccaagccatgtgggcagccgggggccctggaggcagcacatgctggcaggtgcggggagggaggggctgcggagaagatgcttcttggacctttggctgtaagagaaatgtcactgccgtgtcagaacatacagacttaaagacacaacggttggccaggcacagtggctcacacctgtaatcccagcactttgggaggccgaggcgggtggatcacttgaggtcagaggtttgagaccagcctggccaacgtggtgaaaccctgtctctgctgaaaatacaaaaattagccgggcatggtggtgggccctgtggtcccagctactcgggaggctggggcaggaaaatcgcttgaatctggcaggaggaggttgcagtgagccgagagcgtgccactgtactccagcctcggcaacggagacattgtctcaaaaaaaaaaaaaaaaaaaaaaaaaaaaa

SEQ ID NO: 58411 - DNA, 1975 bp, Homo Sapiens
ggccgagatggtgccattgcactccatcctgggcaacaagagtgaaactccatctcaaaaacaaacaaacaaaaaaaaaaaaaaaaaaaaaaaggcaagcaccaaagcagtgattgacctagccgatggagaataccctttccttcactaaaacctgaagcttagcatggttcttgggaaggaagttctggaagtgatgaggatttgttgacatccctgtggattagtgacattgatgggcaccagaaagcaggtgtctgttgtgacagaaaaccagggtggaagctacaagtgacatctacaaggtaggccctgcccactctgacctccagctgcaccccgagcggagcagctggggcatcatggaagtggttgggccatgcagcggagccctgagcccctcagcaggttcatcccacagccctgtgttgtgggtactcttgttatccccatctatagaagaggcagctgaggcacagggcgtttaagtgactttgtcagtcacttaaatcgaatccctcatcagagctggggattcgattcaggcagcctggctccaggagctgagccctcagcccctgcactacactgagggggcagcagaaaggaacccaggtgaagactataaagatcgccacctcctcttgcttctgtctcacattctgtacttacgggtgcacgtctccacctgcttgctgcttcctgggctgttggcatgcacctgggtggagctggggcccctgtcctgctgtgggtagtgaggccggcaccctggccagtgcgtggcccggtccttagtctggaaggtctgtctgcctctcgtgccacagctggcggctggggcctcagctcctcagctgcactcgcctcacttgtttattcagctgatggggttgaggtctcccgtgtgccgggcactgtgctgttgtgaatgagcccgctgctgttcaaagcagacatcacagcggccatagggtaacgccatccagggggaaggccccactccagatgaggtgtgtgtgtttgtgagaggccccacgaagacaggtgtccttagccatcccagcagcctcacccaggaggactgcctgatgggagccctctgagggccactgtctagagaggtggcactgcacaggtagcctgctccttcagaggtaggtcttgagggggtcacagtgtaggctgaagaacgctggcttgaggactcaaggagctgaaggccaccatcctggctctctccctgggtgagtgacttacttgccaagcctccccttctcatctttggaggcggctgcttcaaggggtttgggggaggtaaggagatgagccgggaggggcgggctccggccagtgtcgggggcacacaagggcctgcttccccctccctttcactgggcgactggaggacaggcggaggagtgtggctgggcggctggaggacaggcggaggagtgtggcagccggacagctggaggacaggcggaggagtgtggtggctggcagggtatgtgtttctggttctgttgagtgatgcttggaagatcgttctgagaggtcagggcagctcccgggaccccagagcactgggctcctgcaggggactaggaggccggcttttatcagctcatgagcttttaaaaatggagagaagggcaggtgtggtggctcatccctataatcccagcactttgggaggtcggggtgaaaggatcatttgagccctggagttagagaccatcctgggcaacatagaccccgtctctacaaaaagtaaaataacagtcagccaggcatggtggcacacatctgtagtctcagctacttgggaggctgaggtgaaaggatcacttgaacccaggagtttgaggctgcaatgagccatgattgtgcccctgcactcctgtctgggtgacagggagagatcccttctcttggaaaaaaaaaaaaaaaaaaaaaaaaaaaaaaaaaaaaa

SEQ ID NO: 58412 - DNA, 1962 bp, Homo Sapiens
ggcacgaggcacagacacacgctccctccctccgcgctctacccctcgcccgcccgccgcgcacgcagccggccccggctcccggcgccccgcgccccgcgccccgcgccccgccaccgccgccgccgagcaaagccgggctgggcttggagctgctcatggagaaagtgccaggcgagatggagatcgagcgcagggagcggagcgaggagctgtccgaggcggagaggaaggcggtgcaggctatgtgggcccggctctatgccaactgcgaggacgtgggggtggccatcctggtgaggttctttgtgaacttcccctcggccaagcagtacttcagccagttcaagcacatggaggatcccctggagatggagcggagcccccagctgcggaagcacgcctgccgagtcatgggggccctcaacactgtcgtggagaacctgcatgaccccgacaaggtgtcctctgtgctcgcccttgtggggaaagcccacgccctcaagcacaaggtggaaccggtgtacttcaagatcctctctggggtcattctggaggtggtcgccgaggaatttgccagtgacttcccacctgagacgcagagagcctgggccaagctgcgtggcctcatctacagccacgtgaccgctgcctacaaggaagtgggctgggtgcagcaggtccccaacgccaccaccccaccggccacactgccctcttcggggccgtaggacccctaactccacccccctccctggcagcacctcgagcagaaggccgagttctgaagaccctccttgacgctccatttctgggtgccaaggaagctggaggaatccctgactcaacttccccgaaggaggcctctgtggcggccagggtccccccctggagctgctgggaggcggcgctggctgcctggatgctgaccccagcgcggcgggcagagcggggcccactcttcttagcttttctactcactgttagagagagacctagctgagcggctggcaggaagcgggacaggtctaggagtcccttagggaataaaccagccccgtttctatcagcccggccagcatgcaggtctccacatcaccatctagagtatcacgcacacatctaccatatatacagatatattctatatacgagctatatataaatatatatatacatatatatatacaaaaaaaaaaaaaaaaaactcgagactagggaggggtaaggccggccccactcaggcagacgtgtgtaagcacactccagaacactgcttccccttcccagacagtggtcagaccagaatcccaccctgcacccacctcccccaccacccggtgaccaggtgttggggcagctgggcagagcaaagggagcagaaatccaggagggcttcctggaggggtggaccgagtcagtggacatgcagcatcctcgggaagagctcgccctccggactggggatgctgagctggctgcatgggcatggtgttggaggcagcctacggttgtggttggccggcacatctggagccagacacctcagccacagatcccagctctgccatttctgacagcgtggccccgggtgtgttactgcttgtctctgggcctcagcttcccctcgataaaaagagaggataaaaatagcacttgccagccgggcgtggtggctcacgcctataatcctagcactttgggagggcgaggtgggtggatcacgaggtcaggagatcgtgaccatcctggacaacatggtaaaactccgtctcttctaaaaatacaaaaattagccaggcatggtggcacgtgcctgtaatcccagctacttgggaggctgaagcaggagagtcgtttgaacccaggaggtggaggttgtggtgagccgagattgagccattgcactccagcctgggcaacaagagcgaaactccactcaaaaaaaaaaaaaaaaaaaaa

SEQ ID NO: 58413 - DNA, 1914 bp, Homo Sapiens
gccggggaccacacagagaataacttgtctgactaccagtattcttggatgcagaagtgctgaagatgagcacacacacgtacggagaatttctggagaattcagctgctcagaacaagaactgagatccagagagatgatgactttgcccatagaccaaacaaagaaatacatgtttcagtcctgtgtcctcctgctatgtgtgtccggaattggtgggttcttggtctcactgacttcaagaatgaagctgcggaccctcgcggtgagtgttacagttcttaaaggcagtgtgtccagagtttgttcctactgatgtgtggatgtgttcggagtatcttccttctggtgggttcgtggtctcgctggctcaggagtgaagctgcagaccttcgtggtgagtgttacagctcttaaggtggtgcgtctggagttgttcattcctcccagcgggctcgtggtctcactggcttcaggagtgaagctgcagaccttcgcggtgagtgttacagctcataaaggcagcgtggacccaaagagtgagaagtagcaagatttattgcgaagagcgaaagaacaaagcttccacgatgtggaaggagaccccagcagattgccactgctggcttgggcagcctgcttttattctcttatttggcccccacccacatcctggtgattggtagagcccagtggtctgttttgacagggcgctgattggtgcgtttacaatcactgagccagatacaaaggttctccaggtccccactagattagctagatacagagtgtctattggtgcattcacaaaccctgagctagacacagggtgttgattggtgtgtttacaaaccttgagctagagacagagtgccgattggtgtatttacaatccctgagctagacacaaaggttctccacgtccgcaccagactcaggagcccagctggcttcacccagtggatcccgcactgcccctgcaggtggagctgcctgccagtccctcgcggtgcgcccgcactcctcagcccttgggtggtcgatgggactgggcgctgtggagcaggaggcggcgcttgctggggaggctcctgcggcacaggtgcccacggagggggtgggaggctcaggcatggcgggctgcaggtcccgagccctgccccttgggaaggcagctagggccccgggagaaatcgagcgcagcgccggtgggtcagcactgctgggggacccagtacaccctccacagccactggctcgggtgctaagcccctcattgcctggggccggcagggcctgccggctgctccgagtgcgggccgccaagctcacacccacccagaactccagctggcctgcaagcgtcgcgtgcagccccggttcctgctcgcacctctccctccacacctccctgcaagctgagggagccggctccggccttggcaagcccagaaaggggctcccacagtgcagcggtgggctgaagggctcctcaagtgccgccaaagtgggagcccaggcagaggaggcaccgagagcgagtgagggctctgaggactgccagcacgctgtcacctctcactagtagctatcctacttttaaataaagaattaggctgggcacggtagctcacgcctgtaatcccagcacttcgggaggccaaggggggtggatcacctgaggtcaggaattcgagaccagcctggccaacatggcaaaaccccatctctactaagaatacaaaaatttgccaggcatggtggcgggtgcctgtaatcccagctgcttgagagactgaggtgggagaatcacttgaacccgggaggcgaaggttgcggtaagccgagattgcaccacggtgcttcggcctgggcggcagagtgagactctgtttcaaaaaaaaaaaaaaaaaa

SEQ ID NO: 58414 - DNA, 1734 bp, Homo Sapiens
gggggagtaggcgcgagctaagcaggaggcggaggcggaggcggagggcgaggggcggggagcgccgcctggagcgcggcaggtcatattgaacattccagatacctatcattactcgatgctgttgataacagcaagatggctttgaactcagggtcaggagtttgagaccagcctgaccaatatggtgaaaccttatctccgctaaaaatgcaaaaattggccaagcacggtggcgggtgcctgtgattccagctattcgggaggctgaggcgggagaatcacttgaacctgggaggcggaggttgcagtgagctgagatcacgccactgcattccagcctgggagacagagctggctcaaaaaataaattaattaattaaaaacaaaattggagatgcactatgttattttcaaaacaagctgcctttaaaggtctatctgttgtcacagggtgggctcatctgtttcattttattttctgtggtttatctatttatttattttaatgaactaggaagcattgctcctatttatggcataccacatgatgtttggatacgtgtatgcctgtggcatggctaagtcaagctagaacatgggccttacctcatatacgtgtcttattaagaacacataaaacctactcttgtagtgattttcaaatatgcaacatatagtttattaactgcagtcactatgatgtacaatagattgctcgaacttattcctcctgtctaactaagattttgtgacctctgaccaacatctccccagtgttgtcaccccccgcccccagcctctgatagctgcctttctactctgcttctgtgagtttgatgtttatacattccacatgtaagtggcctcatgcagtgtttgtgtctctgtgtctggcttgttcacttagcgtaatgtcctccagcttcatctatgttgttggaaatgacaggatttccttctttcttgtggctgaatagtattgccttgtgcatatacaccacattttctttatcccttcattcactgatggactgttaggttgatgtcatgtcttggctgttgtgaaaaataccgcagtgagcgtgggcgtgcaggtccctcttcaacacacggatttcctttcctttggatataaacccagcagtgagattgctggatcacatggcagttctgtttctcaccttttgaggaaactccatactgttttccataatggctgtagcaacttccactcccacccccacggtgcaaagtctccatttctcttctacaacctcaccaactcctgttattttccatctttctgatagtagccatttgaagaggtatgagatgatacctcattgtggttttcatttgcatttttatttgtatttttcatgaatttttgagggtgatttcaagggtagttagtgactcgaacagggaaacgatcctgagtatgagggttgtgctaatcatccccctcctgccagctgcgtacggaatggggctctgcagatggcagggagctggctcgtttctctttaagagctgccttttacttttcttcctcttcctttaaaacttatttcctggccggacgcagtggctcatgcctgtaatcccagcactttgggaggccgaggtgggcggatcacgaggtcaggaattccagaccagcctggccaacatggtgaaaccccgtctctactgaagatacaaaaaaaaaaaaaaaaaaaaaaaaaaaaa

SEQ ID NO: 58415 - DNA, 1618 bp, Homo Sapiens
cttttcctattggcacagctgcaggcattcacccatgcaagcttccagcttgcttatctatgtctccaactcaattttacaggctgctctttgttagaaaagaaattattttggggctgctttttgttaaaagggaagccttactgaggactctcttactctcactaatcttctaaataatgtctttttagctcctgtatcaacagggtcttgctctgttgcccaggatgtagtgcagtggcacaattatgactcacctcctgggctcaagggatcatctcacctcagcctcctcagtagctggaaccacagatgtgtgccaccacacttgaccaagtttttatttttttttttagagacgggggtctcactatgttgcccaggcaggtctcgaactcctgggttcaagcagtccttccaccttagcttcccaaagtgctgggattacaggcatgggcaaccacgcccagctagggcaagtgtttatttaatagcccaggaattggaaaagcagaaggatggctttgaaaccaatttatcaattagtgaggggtgatggggttaaaatatagggtttctctaatgtaagtgttggacatgaaaaggaaagggaggagtattcatgtcttttctggaaatgggcagagatttcctggaatctggatgctgccctttttccttcctttaatggtaaggtattgccttttatggctgccagtaggtgtgccagttgtatggtaatcaggttatgatgaagttagaggctcttcagaggtcagatgagctgccatcttggatctcccctgtttctgctggtctggtcaagagggggaacttctgactacaggtatcctgtttgctggagatgaagcagggttagggtgtcacagtgatgtagcccaaccttgcagccttacaagcactagagaaggtaacatcaccagtaaagacttaaagtattttccttagtctttcatttctctaaatatttactgattttgttgaagatgctataaaggctggaattcaaagccacctctttgagaactactcatgctgtgggtatcacccgtgtagatatgaaatatacatgttaatacacttctgtttattgttctcttgttaatctgtctttttaaagatggctgtgttttaactaagaacctatgggggtgagaaaagaaagtaacttttatcagaggaatgcaagtctagagagacatcacaatgagacagcagtcatattctgcttctccctttgagctacgtattcatctctcaaaactgtttgctgttgccatgagtagctataaattaacttaataatgccctgtctcacaccataacacctaccttttagcataacaatgtatagccaatcattaattgatgttatttctgtaaacaactttgtaccttatttgttttgcccttgttttggctttgaaaacctgctttgaaaacctgcttgtaacagaggccaaatatgaacagaggagttcatagccaagattacttggatctgagtcttttgggcagctgtcctcactttggctcaagtaaactctttaaattaaaaaaaaaaaaaaaaaaaaaaaaaaaaaaaaaaaaaaaaaaa

SEQ ID NO: 58416 - DNA, 1250 bp, Homo Sapiens
gaaaatcctcaacaaaaatttgcaagtagaatccaatagtgtataaaaaaaattatacaccacaaccaaatactgtagcataccaagtgtgtagtatcccaagtatgtaaaactggttcagcattctaaagtcaattaatgtcatccatcacatcgacaaactaaggaagaaaaaatgacatgatcatatcaatagatacagacaaagtatttgtcaaaatccaacatctatatatgacaaaagctctcagtaaactagaaatataggggaacttcctcaacttgataaggaatgtctattaaaaaaactacagttaacatcatacttaatgacgataaactgtacagaagctttctcactaagatcagaaacaagccaaatatgtcatctctaataaacttcttttcaatgccatgctagaagccctcgctaatacaataaataagacaagtaaagaaaataacaggtatactgattggaaaggaagaaataaaaactgtctttgttcacagatgtcatgattgtctatgtagaaaatcaaaagaattaacaacaacaacaaccaaaaaaaaaactcctgaaactaataagtgagtatagtgaagttgcagggtacaaggctaatacacaaaagtcaagtgctttcctatgtaccaacaatgaacaagtaggatttgaatttaaacacataatgccatttacattagcaccacaagaatacacaacacttagatataaaaatctaacaacatatgtacaagatttatgtgaggaaaagtgcaaaactctaatgaaagaaattagagatgatctaaataaatggagagatattcaacattcatggataggaagactcaatattgtcaagatgtcagttcttcccaacttgatgtatatattcaatacaatactaatcaaaatcctacagagttattttgtggatattgacaaactagttctaaagtttatatgtagagacaaaagacccagaatagccaacgcagtactgaaggagaagaacaaagccagaggactggcactacttaacgtcaagacttaccgtaaagcgacagtaatcacgacagtgtggtatttgtgaaagaatagacctctaccaatagttcagtggaataaaatagagggcctagaaatagacccacataaatatagtcaactgacctttgacaaagcagaaaacaaaaggtactggaacaactggacaaccacatgcaaaaaaaaaaaaaaaaaa

SEQ ID NO: 58417 - DNA, 1088 bp, Homo Sapiens
cgccattgtatggagagaccacattttgtttacgcgttagtctgtcgacggacatttttgcctccacattttggcgactgtggctaatgctgctatgaacatggctggacaaatatctgtttgagaccccgctttcagttcatgtgggtctattcctagaaagatccatgcttttgttttctttttcatgcattagctgtttcttgaggtcttgttctgcatctggtgccatctgtcctggcctcaggccgggccctttgcagacccagtgtgtgtagggggttgcgcagggtgaggctttgccccaggctggggtagagttggtcatgggtgggctgctcagtctctgctctgacctggcaggacatgctgaagaacacccccaggggccatccggacaggctgtcgctgcagctggccctcacagagctggagacgctggctgagaagctgaacgagcagaagcggctggctgaccaggtggctgagatccagcagctgaccaagagcgtcagtgaccgcagcagcctcaacaaggtgagctgggcctcccacctgcctgccctcacctgcctgccctcacctgtgctcctgcccgtgcccctgccccacgccacccacactaggtggcagtgttctctgagggaggggaggccttgctcttccaaggatgtgaccttggggattggatcctcagcgggacccccacgttcattcctgttcatgttattttaagataaaagttcattttgtgcatcagtgtgatttccagtaaagtctccagaaatcaaagcctagttaaatgaacaggctctggagagtcagaatctgggtttagatccagattttgccataggtgcttgctgtgtgccctcaagggaatcacccaccctctctgaacctcacttgctccctttgaaatgaggagcatttaatagcaccggagccctagggctgctgccgcaaaagagggagctggcaaagtggcttcgtgattgtccttaacacaagaagaaagatgaaaagtccatgccatgttttggggttgccgcttaggaacatgctattaaaaaaaaaaaaaaaaaaaa

SEQ ID NO: 58418 - DNA, 566 bp, Homo Sapiens
acatattacattattattactagaccatgcctccaagtgtgtcaaattataaaaatgtgttcagcatacataaaatatacattaaagatttctctcatcataggcacaatctaatacaaaaatatatttgacatttataagttagaagatccattgagagcctccaaaataggacaggggaaggaatgagtgatgacaacataaaaaaagaagcacacatagatgcaaatagttccacttatatgattattttcttcatcagcaaagggttaagagcagtttacaccaaaccaagttaccaagcagatcacaatcagttcacaggttggataagtcacggcacgcaggccagaaaatgtacttttttttttttttttttttgtaaaaattattttattatttcctatttttttttcataggatggggtctcactatattgcccagcctagtctttaacttccggctttaagcagtcctcctgcctcagcctctcaaagtattgatattatgggcatgagcccctgcacccagcctgatttttttaatttgtataaatttatggggt

SEQ ID NO: 58419 - DNA, 404 bp, Homo Sapiens
  misc_feature (284)..(284): n is a, c, g, or t
tttttttttttttttgaggcagaattttgctcttctcgcccaggctagagtgcaatagcgcgttcttggctcactgcaacctccgcctcctgggttcaagcaattctcctgcctcagcctcccgagtagctgggattacaggaaggcaccaccatgcgtggctaattttgtatttttagtagagacaaggtttctccatgttggtcaggctggtctcgaactcccaacctcaggtgatccacccgcctcggcctcccaaagtgctgggattaccagcgtgaccnactgcacctggtcaagtatcatggttttttaatagtatgcacacatgggacaaaactcaactggtataaaagggtatgcaggagaaaaaaagcaaacttccctctctcccttttctgtcc

SEQ ID NO: 58420 - DNA, 468 bp, Homo Sapiens
  misc_feature (403)..(403): n is a, c, g, or t
tttttttaacacttggaagctcctcaggagcagaaacaacgtgtggttacctttttgtattcctgatggtgctcagcatagaatgcatcacatgacatgtgtcaatatttatttgatgaatgatctgacatgacatggaataatccaggaatgccaaggcatggattcaccacttctgaaaaaacctgggaaactgctacaaaaggggttgttctgatgatccactggcaaagaggaggcacaaaaacagccaggctccagaattcactgaggtgaaatgagttaatgaaaatcaaaacagaggagcagcaagaccagtggaaataactccaatatccaaggagtgaccaactggcacagatcatcccccgctctactctccctccaaaagccagaccactgngaagtgtccacggcggtcagatgccatcaggagctgaaatgaaatggactatgcggtgtatgtct

SEQ ID NO: 58421 - DNA, 5724 bp, Homo Sapiens
cgctccctcccgaggggccgcgcgcacgggaggacggagaggcggaaaggatggcgctgtgacagccgggccggagccctcgcgtccccaccccgcgccctggccgctgggcccggcgagatggagtccacagcctaccctctcaatttgagcctgaaagaagaggaagaggaagaagagattcagagccgggaactagaggacggcccggcagacatgcagaaagtacgaatctgctctgagggcggatgggtaccggccctatttgatgaggtggccatatatttttccgatgaggaatgggaagttttgacggagcaacaaaaggccctctaccgggaagtcatgaggatgaattatgaaactgtcctgtccctggaattcccattccctaagccagacatgatcacccgtttggaaggggaggaggagtctcagaattctgacgagtggcagctccaaggaggcacctctgcagaaaatgaagaatctgacgtaaagcctccagactggccaaacccaatgaatgctacctcccagtttcctcagcctcagcactttgacagctttggcctccgtctgcctcgggatatcacagagctgcccgagtggagtgaggggtaccccttctacatggccatgggcttcccagggtatgacctctcggctgatgacatagctgggaagtttcagttcagccggggcatgcgccgcagttacgacgcagggttcaagctgatggtagtggaatatgctgagagtaccaacaactgccaggctgccaagcagtttggagtattggaaaaaaacgttcgagactggcgcaaagtgaagccacagcttcaaaacgcccacgccatgcggcgggcattccgaggccccaagaatgggaggtttgctctggtggaccagcgtgtggccgaatatgtcagatacatgcaggccaaaggggaccccatcacccgggaggcgatgcagctgaaagctctcgaaatcgcccaggaaatgaacattccagagaaagggttcaaggcaagcttgggttggtgtcgaagaatgatgagaaggtatgacctgtctctgaggcataaagtgcccgtgccccagcacctgccggaagacctgactgagaaactcgtcacttaccagcgcagtgtcctggctctgcgcagggcgcatgactatgaggtagctcagatggggaatgcagatgagacgcccatttgtttagaggtgccatcacgggtaactgttgataaccagggcgaaaagcctgtcttggtcaagacaccaggcagggaaaaactgaaaatcacagcaatgcttggtgtcttggctgatgggaggaagttaccaccgtacatcattttgaggggaacatatatccccccggggaagtttcccagtgggatggaaattcgctgccaccggtatgggtggatgactgaagacttgatgcaggactggttggaagtggtgtggagacggaggacaggagcagtgcccaagcagcgagggatgctgatcttgaatggcttccggggccatgccacagattccgtgaagaactccatggaaagcatgaacactgacatggtgatcatcccagggggtctgacctcacagcttcaggtgctggatgtcgtggtctacaagccactgaatgacagtgtgcgggcccagtactccaactggcttctggctgggaacctggcgctgagcccaaccgggaatgctaagaagccacccctgggcctctttctggagtgggtcatggtcgcgtggaatagcatctcaagtgagtccatcgtccaagggttcaagaagtgccatatctccagcaacttggaggaggaagacgatgtcctgtgggaaatcgagagtgagttgccaggaggaggagaaccaccaaaagattgtgacaccgaaagcatggctgagagcaactgaagggaaagggaaagcaaatggaactctgatttaaacagctggggatgaaattcctcaagatgattattcctgaaagtgtggatgcgctggatgcgcagggaacatcaggaaaaggccacggggctctgaacagccccggtccagacagcagcctgtacatccatcccaggacacagcccagcccctccccacaccatacaaggtatcagaaaagtctaggacctatcatttcatcagagacatgatcagaaaagaaactgcttctgccccatttcttgttttggagattactccatctgtccatcaaaagaaacctgtaaatatgaaagaacaaaggttatttcctggagaaaagacaatttattcaacaccaacgagggactcatcatatgggcacaactctggtgtccttctatggagaaaacctcaagtaaagttttattctgcctttgaaaatgcttccaaaagtagaccctgtccccacacaggtcaagactacagagaaggctttgtagaaatgtgtcacctatgtacacctgctacttacacatttcctcttttggaaaaatgagatacttagaataacaagaaaattaagacatactggcctggtgccagcagatggcttttctatagacaaactaggttagtgtggaagatataggttaaaataaactatgctgttttatttatcttcccaacctgattggcagctagacttttttagggtctcatttaatggccctgtttttttcattattatatttaatgatagggcaggatttcgtatgcaagctcttgtttctcaggctgcctgcagaagaagtcgctataaattatctgttgtctacatggtacaaggcccattgactcatctgatgcttgttttgttaatttctttaatatttttatcacggggcagtgggagggcttgggcttttagccacagctgttttaagacttctgatctcctgccctgcaggaataggtgggaagtcattgaatttttacactatagtaatttgcattcccacataagtttgagtgttacgaaaacattcctttaaagggatctgtgctacacaaaatatgccaggacctcacagacaaagccattgctagaaatgtcattccaatgatcagatctggaaacaggctgccataaccacttttccttcttgtagactcagctcacctgtatatttaaactgttcttggcatcttgaaacacctatttctactcaggtactcattgtcctgttactgattcacctttctgatccttttcaaccagttttcccccaaggggggaaattttacttaacctctagtatttgaacaactcaatatttgaattgttgccccatttgcttttacctgtactgtattcttggtcatctcaaatggcgtctaaacccagctactttgcattccagaagtttccattccctccaattccacctaatttttcatctgtcctagttactggctctttcttcatgtcttatttctcttgctttgggagcttaaaagattttacaagacctaattttgggttccttccttggagccatagttaccctgccaagaagagtagaaaatgggttcaactcctgtttcgctccaccaacacctctgtgagtctcatcatcagctgagcgatgatgccttacaggttgcatagcactggaactttcctagagtaacggctctgctgccagggtttctctgggctcattcttccactgacttaattatgatctatgcctaacagagccccagtacaactattttgcagaatggctgttaccctagaattactatagcacatattgagatatagttgtactccctagtagataggaactgaccccaacaataaactttgataataaagacaataggctatggtgattttatttctttacctattagcattgtgaaaagttacattcaaggtattggctacaccttattctccatccggtttggtaccaatatattacatctttcagtcaaaaagtgttcatgagatgcagtgtaagtaatattggtatctgtgaagacacagggaagaacgtgtgcagtggggcaagtttgacataaatagcttttttcctcagtcatgttttgtatgctctcagcagtggtacattaccaaaatcacatgaaagaaatcccataaagggatctgaattttaaatgaaagtatgatgaacccgcaagtcttaattatgcacttttaataaaattagtcctgacaatttacagtgcccataaagtagtagttgattctccaggaataatctggcagtgttatttttccttttcaacccatcagcattaaatgctgagccactctccaagtctgacccctagactaagcttccttactcttactcttcctcccagaggcattttggaatgagtcaaaggcatggtaggacacggcatttacctgtggtcatcacttcaggcaatggaaaggaaaagtgtttgtccttggttgatcagagaagtgggtgataagaacgtgctaaataacaaacctgcacacttgtacctctgaacctaaaatgttttttttttaattcagaacaacaaaagaacatgctaagcgagtcctcccacctgcctggtaaaatacagccagctttatcacacctggttttgcacagtgataaattcctgcaggaaaaaataagttttattctaagtctgaaattatatggtttccaacagctttttccctcgttaaaataattatttttctacatgatgcttgataataagcatttgtttcttaacctaattagagaagcgattgcactcgagtccccacagctggcagtggtgttacagatggaaccagcctttggtggacagagttcagatgtttcaggggctcttgtgaaaatgctaagtattactgtttctaccttactgccctgcactttaccccatcatctcccctccttagaaaatgatttcataggaaaattggcatggagagcagatagtagagtgtagacctgaaatacatgaggcaaaggcagtcttccagcattctatggtcccaccaggtgggtaggtgactaggaattcaggccaggtcctagagagtagtgagaagttttccagtttgcagttttctctgtgctgtatgtacagccatacagcctatggaacctgacattgcagtgggcagcaggacacggtcaaggctcctagctgcctctccatctatggaactatgaaatttcacacatattccctaggcagcattaaggcccaggtatattgagtagtccaaaccaaaaaactatattcgagtatcagtttaaattcttccaagccctaaaaattcttacgtagtttctcacctaaaactaatggcttgtgccaagaactgaaactaagctattgatttttttttaagaagtcttaatctatacataagaaattacatacctggccaggtgcagtagttcaggcctgtaatcctaacaaacactctgggaggccaaggtgggcagactgcttgagctcaggagttcattaccagtctgggcaacatgataaaaccgtgtctttacaaaaaaaaaaaattttaaattagccgggcatggtggtgtgaatctgtagtcccagctacttaggaggttgcgatgggagaatcacctgagcccagaggtccagtctgcagtgagccatgatcacaccacagcactccagctggggtgacagagtgagaccctatctcaaaaagaaaag

SEQ ID NO: 58422 - DNA, 5421 bp, Homo Sapiens
ccgggatccggttttttttgtttttaaaagtgtaatttcctttttatttgcatctgtttatgactgaaaaaaatgactagttattatgaagacactactgttgaagatggatattttaacatggagtttcaacaaaattacttcttgagacagagctgatgtgttttttaaataacgtgattttaagcatatatttgaacaaaactaaaacatttagtattatgaatatgaaaaaagatcagtaaatcaatgtactcttctaggctgaattaaggtagactatttaaggtttcaaaaaagtttggctggggcagaataagttttacaaaacccatgccatccaaaattaagatgacatgtagcagcaagaagtattccaatgtctcataaccagttctcgcaagcaatgtgtattccttactttaaggaagtgtcaaacaaatagaaaaatctggaagaatttactaagtgtaataaattagaggtaaatcgtaataaaagaatttatgtctcacaaaaatattcacaagtgggagttttcttttaccaacttctcagagtccttctagccccctcttcacttctgaaagatgggatttaccaaaatctggtttacatttaacttttcagggacacatgacctgaaaagaaagatgtcagataatactgacattgcctcatgcactttctttgtatcagtccttcttctgtaagtaatcagaattgggtccaaatggcatagaatcaaacattatgtatcatgccaaataccacttcctgcccaacaaaatttcatctttctccagtaatgaagaggtggacattcttgttggactgtagcatctgtgccgcccgctccacaccaaccacggcagctaacctctgggcatcatatttggagtagagaacagtgcaggtccacgtggcctcttctcctctgttggtggctctcagcatattacagatttcactgtaaaagtgtggatatgtcggcagttcatagaaaatcaggttcctgatgccttttattgctgtagtttatttccacccccttccctcctgttttctctctctccttctctctctctctctctctctcttttttttccgccctagctggggctgtgttggaggagaggaagaaagagagacagaggattgcattcatccgttacgttcttgaaatttcctaatagcaagaccagcgaagcggttgcacccttttcaatcttgcaaaggaaaaaaacaaaacaaaacaaaaaaaacccaagtccccttcccggcagtttttgccttaaagctgccctcttgaaattaattttttcccaggagagagatgtcttatcaggggaagaaaaatattccacgcatcacgagcgatcgtcttctgatcaaaggaggtaaaattgttaatgatgaccagtcgttctatgcagacatatacatggaagatgggttgatcaagcaaataggagaaaatctgattgtgccaggaggagtgaagaccatcgaggcccactcccggatggtgatccccggaggaattgacgtccacactcgtttccagatgcctgatcagggaatgacgtctgctgatgatttcttccaaggaaccaaggcggccctggctgggggaaccactatgatcattgaccacgttgttcctgagcctgggacaagcctgctcgctgcctttgaccagtggagggaatgggccgacagcaagtcctgctgtgactactctctgcatgtggacatcagcgagtggcataagggcatccaggaggagatggaagcgcttgtgaaggatcacggggtaaattccttcctcgtgtacatggctttcaaagatcgcttccagctaacggattgccagatttatgaagtactgagtgtgatccgggatattggcgccatagcccaagtccacgcagaaaatggcgacatcattgcagaggagcagcagaggatcctggatctgggcatcacgggccccgagggacatgtgctgagccgacctgaggaggtcgaggccgaagccgtgaatcgtgccatcaccatcgccaaccagaccaactgcccgctgtatatcaccaaggtgatgagcaaaagctctgctgaggtcatcgcccaggcacggaagaagggaactgtggtgtatggcgagcccatcactgccagcttgggaacggacggctcccattactggagcaagaactgggccaaggctgctgcctttgtcacctccccacccttgagccctgatccaaccactccagactttctcaactccttgctgtcctgtggagacctccaggtcacgggcagtgcccattgcacgtttaacactgcccagaaggctgtaggaaaggacaacttcaccctgattccggagggcaccaatggcactgaggagcggatgtccgtcatctgggacaaggctgtggtcactgggaagatggatgagaaccagtttgtggctgtgaccagcaccaatgcagccaaagtcttcaacctttacccccggaaaggccgcattgctgtgggatccgatgccgacctggtcatctgggaccccgacagcgttaaaaccatctctgccaagacacacaacagctctctcgagtacaacatctttgaaggcatggagtgccgcggctccccactggtggtcatcagccaggggaagattgtcctggaggacggcaccctgcatgtcaccgaaggctctggacgctacattccccggaagcccttccctgattttgtttacaagcgtatcaaggcaaggagcaggctggctgagctgagaggggttcctcgtggcctgtatgacggacctgtgtgtgaagtgtctgtgacgcccaagacagtcactccagcctcctcggccaagacgtctcctgccaagcagcaggccccacctgtccggaacctgcaccagtctggattcagtttgtctggtgctcagattgatgacaacattccccgccgcaccacccagcgtatcgtggcgccccccggtggccgtgccaacatcaccagcctgggctagagctcctgggctgtgcgtccactggggactggggatgggacacctgaggacattctgagacttctttcttccttccttttttttttttgtttttttttttaagagcctgtgatagttactgtggagcagccagttcatggggtcccccttgggcccacaccccgtctctcaccaagagttactgattttgctcatccacttccctacacatctatgggtatcacacccaagactacccaccaagctcatacagggaaccacacccaacacttagacatgcgaacaagcagcccccagcgagggtctccttcgccttcaacctcctagtgtctgttagcattccttttcatggggggagggaagataaagtgaattgcccagagctgcctttttcttttctttttaaaaattttaagaagttttccttgtggggctggggaggggccggggtcagggagagtctttttttttttttttttaaatactaaattggaacatttaattccatattaatacaaggggtttgaactggacatcctaatgatgcaattacgtcatcacccagctgattccgggtggttggcaaactcatcgtgtctgtcctgagaggctccacaatgcccacccgcatcgccattctgtagtcttcagggtcagctgttgataaaggggcaggcttgcgttattggcctagattttgctgcagattaaatcctttgaggattctcttctcttttaccatttttctgcgtgctctcactctctctttctctctctagctttttaattcatgaatattttcgtgtctgtctctctctctctctgtgtttcctccagcccttgtctcggagacggtgttttcctcccttgccccattatcttttcacctcccaggtctacatttcatggtggtcgttgggtccgcctaaaggatttgagcgtttgccattgcaagcatagtgctgtgtcatcctggtccatgtaggactggtgctaaccacctgccatcatgaggatgtgtgctagagtgtgggaccctggccaagtgcaggaatgggccatgccgtctcacccacagtatcacacgtggaaccgcagacagggcccagaagctttagaggtatgaggctgcagaaccggagagattttcctctgtgcagtgctctctggctaaagtcacggtcaaacctaaacaccgagcctcattaacccaagtgaaccaaccaaagtcaccagttcagaagtgctaagctaataggagtctgacccgagggcctgctgcttcctggttaagtatcttttgagattctagaacacatgggagctttttattttcggggaaaaaccgtatttttttcttgtccaattatttctaaagacacactacatagaaagaggccctataaactcaaaaagtcattgggaaacttaaagtctattctactttgccaagaggagaaatgtgttttatgaacgatagatcacatcagaactcctgtggggaggaaaccttataaattaaacacatggcccccttagagaccacaggcgatgtctgtctccatccttccctctccttttctgtcacctttccccctagctggctcctttggacctacccctgtccttgctgacttgtgttgcattgtattccaaacgtgtttacaggttctcttaagcaatgttgtatttgcaggcttttctgaataccaaatctgctttttgtaaagcgtaaaaacatcacaaagtaggtcattccatcaccacccttgtctctctacacattttgcctttggggatctggttggggttttgggttttttgttgttgttgtttatttgttattttaaaggtaaattgcacttttaaaaaaataattggttgacttaatatatttgctttttttctcacctgcacttagaggaaatttgaacaagttggaaaaaaacaatttttgtttcaattctaagaaacacttgcagctctagtattcacttgagtcttcctgtttttcctgtaccgggtcatggtaatttttggttgttttggttgttttcttaaaaaacaagttaaaacctgacgatttctgcagtgacttgatgctctaaaacagtgtaggatttaagaatagatggtttttaatcctggaaattgtgattgtgacccatgagtggaggaactttcagttctaaagctgataaagtgtgtagccagaagagtactttttttttgtaaccactgtcttgatggcaaaataattatggtaaaaaacaagtctcgtgtttattattccttaagaactctgtgttatattaccatggaacgcctaataaagcaaaatgtggttgtttcaaaaaaaaaaaaaa

SEQ ID NO: 58423 - DNA, 155 bp, Homo Sapiens
gcacgagaagaagtatcacttctttctcaagtggagtgtttacaccttgctgtaacatttgaactttcacaagagatgtaataattttgataataaaattcttaaccataataatcataaagttgagaaaaaaaaaaaaaaaaaaaaaaaaaaaa

SEQ ID NO: 58424 - DNA, 308 bp, Homo Sapiens
ttttttttgttttttttttacatgttcacccagtgcattattttatttaaaaagaagaaaaatatatacttaacggctcctaatccagctctctttgcctggtctcccaagacacctatcattttgcccagcacataccttgccgctgtgccacactggagtccccggttaggttccctgtgcttagaccgccccctagtccctccaggaagcctttcccaaccctttcgcgttaactgcccgcctcatcatcacaaaggtaacttgagcttttatcagttttaattactccttttaatcctcgtgcc

SEQ ID NO: 58425 - DNA, 511 bp, Homo Sapiens
  misc_feature (429)..(429): n is a, c, g, or t
  misc_feature (452)..(452): n is a, c, g, or t
  misc_feature (486)..(486): n is a, c, g, or t
  misc_feature (506)..(506): n is a, c, g, or t
  misc_feature (511)..(511): n is a, c, g, or t
gaattttaaactatttttattttaaagttatggcataacatataacataaaaatattttatatacgtttgaaaaatctataccgttcttttttatcatcaaagtttctcaatggccagtagaagcaaaaagacaacaccacctctgatctacgggacataatgttcccaggaaaaaaatcttcaagtgggtgtgagggtgtttctaattcaaaatatgtagatttctccgcatggaagaaagtaagtaaagattttcttaacatgctcctgtgttcatgcttggagacaagaataagatggtttagaagctttaccctttcttggaacaagtagaatcccggtctgagacctctcaggaatttcagagcttagcagtctggcctggagggttttcagccctttagtataataaacagtagttgcctccnagagttgagtttttaagggttcnccaaaaggagcccgtaccaaatatacatacaggntccttatttaaacactggtnaaccn

SEQ ID NO: 58426 - DNA, 507 bp, Homo Sapiens
aatgtctgtctctctgatcagtggaaaagtgaaaatttctagtatctagcactaacgtatgacccaactttgagggatcacaagctagaacaagttgaggatttaaaatcctggataattatatacttatagctcatgagcataaagctcacttgaccatgcagaaatgctgggaagcagggtgcatggcatgggaatacatctccctgatctttgagagagcctctctggatattctttcagagcatgagccaggatgtactgactactttcttcacacatcagttgccctttatgatctcagttcataaactctttgtggtatgtagcaatcaaaagtcatattacttctgtaaaactaacattatatagggtgtatagtcccagacaaattatatgaagctagatttttcttgccctggcccaatttatcattcctcctcctgcccacacctacctccctttaaatattttaggttgcagaagcacagctgaccagaaatttgc

SEQ ID NO: 58427 - DNA, 566 bp, Homo Sapiens
ttaaattttatgcatgtatacacactttattaaatttgcattctaagatatacacaaggccagcatttcacaaaacttcctattattccaaaagcagtaatcatgaaacagtgattatataagtcaatcaagcaaaaaacattatctatagggttgtatcatatcatctcttatacctgttttcaaatagaagcctgaaatatatgatatatattagaataggaagagagaattttactttataacaatcgcttttcaaatattagactttatataaaaataaaggggtcttaacaaagttcatctgtgagttagcatatctctttatttcaaaacaatccctgcaaaaacttaactttccagtccatttaaacaacaaaaactaaaaatgaagcttggtttaaataataaagtgaatcatcttgtctcctagttctcacaccattggaacaacttccatttcctgacctaattctatcccaccattgaatttcaaaaattaatgtaaataccatcatatttcagttatttcttaacagtgttaagttcgagcctaaaaatgatgg

SEQ ID NO: 58428 - DNA, 794 bp, Homo Sapiens; identical to SEQ ID NO: 30315

SEQ ID NO: 58429 - DNA, 484 bp, Homo Sapiens
acgatctcggctcactgcaacctccacctcccgggttcagggtgattctcctgctttagcctcccgagtagctggaatagcagacgcccaccaccacgcccggctaattgttgttgtattttatagtagagacagggtttcaccaggttggccaggctggtctcgaattcctgacctcaggtgatccacctgccttggcttcccaaagtgctgggattacaggcgtgagccaccgcgcccggcctggggtaccactttaagaaggctcaggcgaaccaccttaagatagtgagagtctgcctgccccataagtattatcagtccttcaaagtcacttcaaataaagcacctaacagcagctggaaaaaaaaaaaaaaaaaaaacaaaaaacaaaaaaaaaacagaaaacaaaaacacacaaaaaacaaccaacaaagaaacacaaaacaacaacagaaagacagaaccagcaacacaaacaggg

SEQ ID NO: 58430 - DNA, 521 bp, Homo Sapiens
agcagcataaataagtttggccactgggagtacagtacagggttgggacaacaatcccatatttgaagacctacttctagcaccagcatcaagaattaaatccatctcaggactcacagaacccaggacaacttgccacctttgagcaacatatgcattgaagaatgtatatggaagcaacagtaaatagattaacagaggctaatactgtgattgattgacattggcaatggttggcaaaaaaaaaaaaaaaaaagcttttcatgataactgtacaaaaacaattcacagtaatttttttaagcttttccactccagaaaaatgactttttgttgcagatgctctctaattagaaagtcaaccagtacttgttttgatattattgcagttcctttctaggtgtctagctgtcagtggtaaaagaacaggctagcagaatctgtaagatgtttcagcattaacactgcccaatgaccactggagaagaaaataaagaaataattgcacctggtttgattta

SEQ ID NO: 58431 - DNA, 452 bp, Homo Sapiens
tttttttttcaatttttaaatatttttatcaataatcactcaaaaagaacatgaaaagggattgctgccccaaggccctcccaggctgaatgcacagggaatatgcctccagccgtaggtgaggcctccactcactccatctcctcgcccgccactagcatgtcccatcccatgcagctagtcgggaggagtgcggggtcttggtgaggtccatgccagcagaaaacaaaagaccaaaagctgccaccttgaagtttcttacccggtttaatgttttctttatagccctggagctggacaagaacagagccatagaaactgctcctctcagcttccgaaccctggtaggactgcttggaatcgaagctgctctggaaagcctgataaaatcgctttgtgcagaggagaacaactagttccaaaacagtgaacgtggaggatgaagatgctgc

SEQ ID NO: 58432 - DNA, 529 bp, Homo Sapiens
aatcttctaagtccttttaattgttcttataaactagcataagatataaacttaagtagtacacatgagttttataatttactaatctctgacagatagctaagcatagcacatcagagcataacacagtgtgagggaaataaagtgtacaatgacatcttctattctggacctaataattcaatagagaaagaactacttgtagtcactgtggttacagaaggtttcatggacagcgaacataaagctctactagctaacaaataggtcttaatgataaaaacgtgggccttcagagaactaaaggtaccaatgtgtggcagtccaaaattacgaggaaaatgagttcccttcatgggtcacatcagcaattttttttttccccttttgagacagagtcttgctctgctgcccaggttggagtgcagtggcatgatccaggctcactgcaacctccgcctcccgggttcaagcaattctcatgcctcagcctcccgagtagctgggattacaggtgcctgtcatcacg

SEQ ID NO: 58433 - DNA, 3485 bp, Homo Sapiens
tccagctgggtagccgggggagcgcgcgtgggggctccgcgagtcgctcgcccttggtttctggggaagcctgggggacgcggctgtggcggaggcgccctgggactcaggtcgcctggagcgtggcacgcagagccccaggcgcggagctgaggccgcgcggccgcgcttggccccagcgggcgtgggactgagcagtctgctgccccccgacatgtgacccagccccgccgcccatgcgggctcccggccgcccggccctgcggccgctgccgctgccgccgctgctgctgttgctcctggcggcgccttggggacgggcagttccctgtgtctctggtggtttgcctaaacctgcaaacatcaccttcttatccatcaacatgaagaatgtcctacaatggactccaccagagggtcttcaaggagttaaagttacttacactgtgcagtatttcatatatgggcaaaagaaatggctgaataaatcagaatgcagaaatatcaatagaacctactgtgatctttctgctgaaacttctgactacgaacaccagtattatgccaaagttaaggccatttggggaacaaagtgttccaaatgggctgaaagtggacggttctatccttttttagaaacacaaattggcccaccagaggtggcactgactacagatgagaagtccatttctgttgtcctgacagctccagagaagtggaagagaaatccagaagaccttcctgtttccatgcaacaaatatactccaatctgaagtataacgtgtctgtgttgaatactaaatcaaacagaacgtggtcccagtgtgtgaccaaccacacgctggtgctcacctggctggagccgaacactctttactgcgtacacgtggagtccttcgtcccagggccccctcgccgtgctcagccttctgagaagcagtgtgccaggactttgaaagatcaatcatcagagttcaaggctaaaatcatcttctggtatgttttgcccatatctattaccgtgtttcttttttctgtgatgggctattccatctaccgatatatccacgttggcaaagagaaacacccagcaaatttgattttgatttatggaaatgaatttgacaaaagattctttgtgcctgctgaaaaaatcgtgattaactttatcaccctcaatatctcggatgattctaaaatttctcatcaggatatgagtttactgggaaaaagcagtgatgtatccagccttaatgatcctcagcccagcgggaacctgaggccccctcaggaggaagaggaggtgaaacatttagggtatgcttcgcatttgatggaaattttttgtgactctgaagaaaacacggaaggtacttctttcacccagcaagagtccctcagcagaacaatacccccggataaaacagtcattgaatatgaatatgatgtcagaaccactgacatttgtgcggggcctgaagagcaggagctcagtttgcaggaggaggtgtccacacaaggaacattattggagtcgcaggcagcgttggcagtcttgggcccgcaaacgttacagtactcatacacccctcagctccaagacttagaccccctggcgcaggagcacacagactcggaggaggggccggaggaagagccatcgacgaccctggtcgactgggatccccaaactggcaggctgtgtattccttcgctgtccagcttcgaccaggattcagagggctgcgagccttctgagggggatgggctcggagaggagggtcttctatctagactctatgaggagccggctccagacaggccaccaggagaaaatgaaacctatctcatgcaattcatggaggaatgggggttatatgtgcagatggaaaactgatgccaacacttccttttgccttttgtttcctgtgcaaacaagtgagtcacccctttgatcccagccataaagtacctgggatgaaagaagttttttccagtttgtcagtgtctgtgagaattacttatttcttttctctattctcatagcacgtgtgtgattggttcatgcatgtaggtctcttaacaatgatggtgggcctctggagtccaggggctggccggttgttctatgcagagaaagcagtcaataaatgtttgccagactgggtgcagaatttattcaggtgggtgtactctggcctcttggttcattattttcaaacaagcacacttgtacaattattttctgggtacttcccatatgcacatagcactgtaaaaaatatttcccaaagatcactcattttataaataccactttttcagaattgggtttattgcgagcaggaggagatacttaaaacatgcacatataccaggttggtggtaagttggtcacatgtgaaaacctcaactatttaatcatcatgattcatattttgagtgaatacatcaggcacagaccttcatgatatcacacactcttggctactttaagaggccatctttaatactttatgagtagttctggagtgtaaacataaacgagtattcttttgtagtcagaaaagtgtcctctcaataatttagtaggggcttattgtctctcaaaactaacctaaaagaaaatgacacattttataatagaatattacatttatttctggaagtgtgttttcaaaaagatatttacatagtctgtaaactagaaagtgttaggtaaagctctaggttactgtgttactattataatattaaacattcgaataggcagtcgttcaaagactctttggaatatctatgaatgaatatcctctattcttataatattaaaacccataagtaaatataggacatacaagagaaatgagttaaatgactatgtaagggagagtttattaaaatttgatgaaatttactgtaggaactaaactatgccataaaacaatagctttctagttcatttccagtaactgttcccatctcctttaccacttgttaagaaaattaaattcttcagtcacgctgctttaaaatgggacaaaatctattaagttgaaccatatataattgtggatatttggctgtttttaatctgacaagcagtaacttcatatggtttgccttaatatatatttgttttagtcatgaactcataatccattgatgctctttcatgagaagagatatgacccatatttccttattgatattattggtacaggcagacaaccctggtaggagagatggattctggggtcatgacctttcgtgattatccgcaaatgcaaacagtttcagatctaatggtttaatttagggagtaattatattaatcagagtgttctgttattctcaatctttatagaaacgattctgctggttttgaagaacagatgtattacactaactgtaaaagtagttcaagagtgagaaagaataaattgttattaagagcaaaagaaaaataaagtgattgatgata

SEQ ID NO: 58434 - DNA, 523 bp, Homo Sapiens
aattgctaagaattttatgtagcaagtttgtttattcagtaacataatcacaaaatagaaatatcacattcacagaagtggaaataaagagcataaaatatttttaaaacaggaaagcaatgggatcactttcaagagcctcaaagaaaacctttaatttacaatgctacgctttcatgattaataggattaatgtgtggtttttctttgataaaagtagtcatgattttttagtattacatacattcattgcatatgacagacactctgataaaaatgtactgttctaattacttaattgttttggctcatttaacaccttgtttaaatagctttaagacatataagaggcaaataattatatatacttaaggataaaattttcagatatttatccaaacacacatttacccattaaattagaacaccaactgcttaatatgtaaaactagtttgaaatcatgactcttgattaaatacatacttcaacatctctcatgagacttcccaacttcaaaaatga

SEQ ID NO: 58435 - DNA, 4177 bp, Homo Sapiens
gttccagtgcgcgggtctgtggagagccgggtgcgagcggcggcagcacgaggggaaaagagctgagcggagaccaaagtcagccgggagacagtgggtctgtgagagaccgaatagaggggctggggccacgagcgccattgacaagcaatggggaagaaacagaaaaacaagagcgaagacagcaccaaggatgacattgatcttgatgccttggctgcagaaatagaaggagctggtgctgccaaagaacaggagcctcaaaagtcaaaagggaaaaagaaaaaagagaaaaaaaagcaggactttgatgaagatgatatcctgaaagaactggaaggattgtctttggaagctcaaggcatcaaagctgacagagaaactgttgcagtgaagccaacagaaaacaatgaagaggaattcacctcaaaagataaaaaaaagaaaggacagaagggcaaaaaacagagttttgatgataatgatagcgaagaattggaagataaagattcaaaatcaaaaaagactgcaaaaccgaaagtggaaatgtactctgggagtgatgatgatgatgattttaacaaacttcctaaaaaagctaaagggaaagctcaaaaatcaaataagaagtgggatgggtcagaggaggatgaggataacagtaaaaaaattaaagagcgttcaagaataaattcttctggtgaaagtggtgatgaatcagatgaatttttgcaatctagaaaaggacagaaaaaaaatcagaaaaacaagccaggtcctaacatagaaagtgggaatgaagatgatgacgcctccttcaaaattaagacagtggcccaaaagaaggcagaaaagaaggagcgcgagagaaaaaagcgagatgaagaaaaagcgaaactgcggaagctgaaagaaaaagaagagttagaaacaggtaaaaaggatcagagtaaacaaaaggaatctcaaaggaaatttgaagaagaaactgtaaaatccaaagtgactgttgatactggagtaattcctgcctctgaagagaaagcagagactcccacagctgcagaagatgacaatgaaggagacaaaaagaagaaagataagaagaaaaagaaaggagaaaaggaagaaaaagagaaagagaagaaaaaaggacctagcaaagccactgttaaagctatgcaagaagctctggctaagcttaaagaggaagaagaaagacagaagagagaagaggaagaacgtataaaacggcttgaagaattagaagccaagcgtaaagaagaggaacgattggaacaagaaaaaagagaaaggaaaaagcaaaaagaaaaagaaagaaaagaacgcttgaaaaaagaagggaaacttttaactaaatcccagagagaagccagagccagagccgaagctactcttaaactgctacaagctcagggtgttgaagtgccatcaaaagactctttgccaaagaagaggccaatttatgaagataaaaagaggaaaaaaataccacagcagctagaaagtaaagaagtgtctgaatcaatggaattatgtgctgctgtagaagttatggaacaaggagtaccagaaaaggaagagacaccacctcctgttgaaccagaagaagaagaagatactgaggatgctggattggatgattgggaagctatggccagtgatgaggagacagaaaaagtagaaggaaacaaagttcatatagaagtaaaagaaaaccctgaagaggaggaggaggaggaagaagaggaagaagaagatgaagaaagtgaagaagaggaggaagaggagggagaaagtgaaggcagtgaaggtgatgaggaagatgaaaaggtgtcagatgagaaggattcagggaagacattagataaaaagccaagtaaagaaatgagctcagattctgaatatgactctgatgatgatcggactaaagaagaaagggcttatgacaaagcaaaacggaggattgagaaacggcgacttgaacatagtaaaaatgtaaacaccgaaaagctaagagcccctattatctgcgtacttgggcatgtggacacagggaagacaaaaattctagataagctccgtcacacacatgtacaagatggtgaagcaggtggtatcacacaacaaattggggccaccaatgttcctcttgaagctattaatgaacagactaagatgattaaaaattttgatagagagaatgtacggattccaggaatgctaattattgatactcctgggcatgaatctttcagtaatctgagaaatagaggaagctctctttgtgacattgccattttagttgttgatattatgcatggtttggagccccagacaattgagtctatcaaccttctcaaatctaaaaaatgtcccttcattgttgcactcaataagattgataggttatatgattggaaaaagagtcctgactctgatgtggctgctactttaaagaagcagaaaaagaatacaaaagatgaatttgaggagcgagcaaaggctattattgtagaatttgcacagcagggtttgaatgctgctttgttttatgagaataaagatccccgcacttttgtgtctttggtacctacctctgcacatactggtgatggcatgggaagtctgatctaccttcttgtagagttaactcagaccatgttgagcaagagacttgcacactgtgaagagctgagagcacaggtgatggaggttaaagctctcccggggatgggcaccactatagatgtcatcttgatcaatgggcgtttgaaggaaggagatacaatcattgttcctggagtagaagggcccattgtaactcagattcgaggcctcctgttacctcctcctatgaaggaattacgagtgaagaaccagtatgaaaagcataaagaagtagaagcagctcagggggtaaagattcttggaaaagacctggagaaaacattggctggtttacccctccttgtggcttataaagaagatgaaatccctgttcttaaagatgaattgatccatgagttaaagcagacactaaatgctatcaaattagaagaaaaaggagtctatgtccaggcatctacactgggttctttggaagctctactggaatttctgaaaacatcagaagtgccctatgcaggaattaacattggcccagtgcataaaaaagatgttatgaaggcttcagtgatgttggaacatgaccctcagtatgcagtaattttggccttcgatgtgagaattgaacgagatgcacaagaaatggctgatagtttaggagttagaatttttagtgcagaaattatttatcatttatttgatgcctttacaaaatatagacaagactacaagaaacagaaacaagaagaatttaagcacatagcagtatttccctgcaagataaaaatcctccctcagtacatttttaattctcgagatccgatagtgatgggggtgacggtggaagcaggtcaggtgaaacaggggacacccatgtgtgtcccaagcaaaaattttgttgacatcggaatagtaacaagtattgaaataaaccataaacaagtggatgttgcaaaaaaaggacaagaagtttgtgtaaaaatagaacctatccctggtgagtcacccaaaatgtttggaagacattttgaagctacagatattcttgttagtaagatcagccggcagtccattgatgcactcaaagactggttcagagatgaaatgcagaagagtgactggcagcttattgtggagctgaagaaagtatttgaaatcatctaattttttcacatggagcaggaactggagtaaatgcaatactgtgttgtaatatcccaacaaaaatcagacaaaaaatggaacagacgtatttggacactgatggacttaagtatggaaggaagaaaaataggtgtataaaatgttttccatgagaaaccaagaaacttacactggtttgacagtggtcagttacatgtccccacagttccaatgtgcctgttcactcacctctcccttccccaacccttctctacttggctgctgttttaaagtttgcccttccccaaatttggatttttattacagatctaaagctctttcgattttatactgattaaatcagtactgcagtatttgattaacc

SEQ ID NO: 58436 - DNA, 475 bp, Homo Sapiens
  misc_feature (11)..(11): n is a, c, g, or t
  misc_feature (24)..(24): n is a, c, g, or t
  misc_feature (61)..(61): n is a, c, g, or t
  misc_feature (135)..(135): n is a, c, g, or t
  misc_feature (257)..(257): n is a, c, g, or t
  misc_feature (277)..(277): n is a, c, g, or t
  misc_feature (426)..(426): n is a, c, g, or t
  misc_feature (437)..(437): n is a, c, g, or t
  misc_feature (461)..(461): n is a, c, g, or t
  misc_feature (470)..(470): n is a, c, g, or t
tgggtttttgngttaatttgtttnataaacattcctgagttttcaaccatacattcttttnacaatacgacaaacaaaacaatgaaagatattcaaaacaaggttccaaggttggcccaacttgattgtttgggnacttgtttttttagtaactctgtaacttttttaaaggaagcttttaatgaagatacaccactgagtcttgctttaagaccaaaaatatccaaacatagtatcacattatatatatctcatangaaaagctattctatcaggnaacaaaaatgaagcttccccctcacctagcagttcatctgggaatgcatcttggaaaagatccaatggcctgttggactcaaagaagccatccccaaaaaaattgtataaaagggtttattgaaatttatccaatgaccaaccgggccntaaaactccanagtttgggctcttctgagggggcngggagaaanactgg

SEQ ID NO: 58437 - DNA, 463 bp, Homo Sapiens
tttttttttttaagagggacaaacactgcaggttttattcaatcgccactgaattgagaagcaggagtatggctcacaaatcaacttttcaactaatgaggagtgagggggttaaaatataatttttctaataaaggtgtttcacattcaagcaaagggaggaatattcctggatttttcagaaatgggcagtgaacttcctaaaaccagagtgctgccttcctttttgtcctttcatggcttcttctggtcactgtcatggcgattgtcaactgtcatggagctagcaggagcgttatttagcacagaaataagattataaaaaggctgaggtctttttaaagtcgtttggtcagctatcgtggttgtaaccagtctcctctggactggttacaaaaggaacttttcatcacaggcatcctgtttcttaaagataagcagagttagggcagggtaaaaattc

SEQ ID NO: 58438 - DNA, 538 bp, Homo Sapiens
tgactttgcaggatgtgctttattttaagtcagccctgaacccaaactacacaggatcaatttttgacatattctagtccattcaatgattcttctcagaaactgtatcttaatatggaatgaaaactacatttcaatcataaatttttcatgctacattgttatttaatgaagaggttgtattaccaataataataatttaagaaaaggccatttttatttccccaagctcaatatacatatttctttcataattatgaacttaaaaaacccgtctcagatgtaaaaatgtgaattggaatatgtaaactctttgatatacctgaaaaacaggaaggaaaatgtcacatactgggaaaaccattgccttaaatcatggaaatgggaaaaagcacgttaagggaaggggaaggcagaagagcggtcctgacctcagttattaaagagttacaaagtattctaggtcccactgggttggtctttttactcttctgcctcatgtctgtttgcacaggagaccgcagccctccagaatggt

SEQ ID NO: 58439 - DNA, 31483 bp, Homo Sapiens
attaaacaccaatttccacagttcattgccaatagctatttttcttattttatctctacatgaaagaaacaaggagagtgtgggactgagtagtaggatcttggtgatcctccctgtcaagtacctctttctttgttctatttagtatggacacttagattgtatcatttaggtaattttaaatcagacttttaaagacttgggtcactaacgaaaaccaacaactctgattttaacaacaattttctgtagcttttgtttattcagtaagtcagagactattgtggaggcacaacttctcagtagttcctagggttacttccttttgggaggagcaacaaggatatgacagactctgggaaaatttcttccaggccagagctgcttgctactgtttgcttctgccccttccactgtctgatgcctaaaccctgctttgcttaaaaccaaacctttcctttttttgcatctcaggtttcattacttccccatccctaactctctgtgtcctccaaactacagtgttaaaaccatagccccagattgcctttagcaatttgcttaacttctcggttcctgagttttttttttttttaatttttaaattttttttttttgaggcagaatattgctctgtcacccaggctggagtgcagtggtgtgatacacctcctgggttcaagtgtttattgtgcttcagcctcctgagtagctgagattacaggacatgccaccacgcctggctaatttttgtatttttagtagagacggggtttcaccgtgttggccaggatggtctcgatctcctcatcttgtgatctgcctgccttggcctcccaaagtgctgggattataagcttgagccagcacgtccagcatcagttttattgtctataaaaagaagggattggatctaagcatcttagagtctgttccaacatttgacctaaaatggcacacatatcaccatattttctgcacctcacccctaaactggactcaaccttccttttttagaatttttctaaaaaacctgtttgttttaaagagacctttttgcatctattaaatactgcaatctgtcgccaatgatatcacaagaactgtttgtttttgtttttgtttgttcgtttgtttttgagacagagtcttgctctgtctctaggctggagggcagtggcgtgatcttggctcactgcaacctccgtcttattcacacataacactattaaccttaaatgtaaatgggctaaatgccccaattaaaagacgacgactggcaaattggataaagagtcaagatccatcagtgtgctgtattcaggagacccatctcatgtgcaaaggcaaacgtaagctcaaaataaagggatggaggaagatctaccatgcaaatggaaagcaaaaaaaaaaaaaaaaaaaaaaaaaagcaggagtggcaatcctggtctctgagaaaacagactttaaaccaacaaagatcaaaagagacaaataaggccattacataatggtaaagggatcaattcaacaagaagagctaactatcctaaatatatatgcacccaatacaggagcaccctgattcataaagcaagttctaagtgacctacaaagatatttagactcccacacaataataatgggagactttaacacctcattgtcaatattagacagatcaatgagacagaaaattaacaaggatattcaggacttgaactcagctctggaccaagcagacctaatagacatctacagaactctccaccccaaatcaacagaatatacattcttctcagcaccacatcacacttattctaaaattgaccacataattggaagtaaaagactccttagcaaatgtaaaagaacagaaattacaacaaactgtctctcagaccacagtgcaatcaaattagaactcaggattaagaatctcactcaaaaccgcacaactacatggaaactgaacaacctgctcctgaatgactactgggtaaataacgaaatgaaagcagagataaagatgttctttgaaaccaatgagaacaaaggcacaacataccagaatctcctggacacatttaaagcagggtttagagggaaatttatagcactaaatgtccacaagagaaagcaggagagatctaaaatcgacaccctaacatcacaatttaaagaactagaaaaggaagagcaaacaaattcaaaagctagcagaagacaagaagtaactaagatcagatcagaactgaaggagatagagacacaaaaaacccttaaaaaaatcaatgaatccaggaggtgtttttttgaaaagaccaacaaaataggtagactgctagcaagattaataaagaagaaaagagagaagaatcaaatacacgcaataaaaaatgataaatgggatatcacccctgatcccacagaaatacaaactaccatcagagaatactataacacctctatgcaaattaactagaaaatctagaagaaatggataaattcctggacacatacaccctcccaagacaaaccacaaagaagttgaatctctgaatagaccaataacaggttctgaaattgagacaataattaatagcctaccaaccaaaaaaaagtccaggactagatggattcacagccgaattctaccagaggtacaaaggggagatggcaccattccttctgaaactattacaaacaatagaaaaagagggaatcctccctaactcattttatgagaccagcatcatcctgataccaaagcctggcagagacagacacaacaaaaaaagagaattttaggccagtatccctgatgaacatcgatgtgaaaatcctcaacaaaatactggcaaaccgagtccagcagcacatcaaaaaccttatcctctgcaatcaagttggcttcatccctgggatgcaaggctggttcaacatacacatatcaataaaggtaatccatcacataaacagaaccaatgataaaaaccacatgattatatccatagatgcagaaaagtcctttgacaaaattcaacagcatttcatgctaaaaactctcaatatcgatggaacgtatcccaaaataataagagctatttatgacaaacccacagccaatatcatactgaatgggcaaaaacaggaagcattcccttggaaaactggcacaagacaaggatgccctctctcaccactcctattcaacatagtattagaagttctggccagggcaatcaggcaagaaaaagcaatacagggtattcaaataggaagagaggaagtcaaattgtctctgtttgcagatgccatgattgtatatttagaaaacaccattgtctcagcccaaaatcttctcaagctgatgagcaacttcagcaaagtctaaggatacaaaatcaatgtgcaaaaatcacaagcattcctatacaccaataacagacaaacagagagccaaactatgagtgaactcccattcaccattgctacaaagagaataaagtgcctaggaatacaacttacacaggatgtgaaggaccccttcaagaactacaaaccactgctcaaggaaataagagaggacacaaacaaatggaaaaacattccacgcacatggatatgaagaatcaatatcatgaaaatggtcttaccgcccaaagtaatttatagattcgatgctatccccatcaagctatcaatgactttcttcacagagttggaaaaaactactttatacttcatatggaaccaaaaaagagctcgcatagccaagacaatcctgggcaagacgaacaaagctgcaggcatcaagctacctgacttcaaactttactacaagactacagtaaccaaaacagcatggtaccggtaccaaaacagatatatagaccaatggaacagaacagaggtctcagaaataacaccacacatctaccaccatctgatctttggcaaacctgacaaaaataagaaatggggaaaggattccctatttaataaatggtgctgggaaaactggctagccatatgtggaaagctgaaactagaccccttccttacaccttatacaaaaattaattcaagatggattaaagtcttaaacgtaagacctaggaccataaacatcctagaaaaaaacctgagcaataccattcaggacataggcatgggcaaagacttcaagtctaaaacaccaaaagcaatggcaacaaaagccaaaattgacaaatgggatctaattaaactaaagagcttctgcacagaaaaataaactattatcagagtgaacaggcaacctacagaatgggagaaaatttttgcaatctatccatctgacaaagggctaatatccagaatctatacagaatttaaacaaatttacaagaaaaaatcaaacaaccccatcaaaaagtgggtgaaggatatgaacagacacttctcaaaagaagacatttattcagccaacatacatataaaaatgctcatcatcactggtcattagagaaatgcaaatcaaaaccacaatgagataccttctcaagccagttagaatggcaatcattacaaagttaggaaacaacagatgctggaaaggttgtggaaaaatagaaacgcttttacactgttggtgggagtataaattagttcaaccattgtggaagatggtgtggcaattcctcaaggatctagaactagaaataccttttgacccagcaattctattacaggacatgtacccaaaggattataaatcattctgttataaagacacatgtacacgtatgattattgtggcactattcacagtagaaaagacttggaaccaacccaaatgtccatcaatgatagactggattaagaagatgtggcacatatacaccatggaatactatgcagccatgaaaaaggatgagtttgtgtcctcttgtgggacatggatgaagctggaaactatcattctcagcaaactatcacaagatcagaaaaccaaacgccgcatgttcttactcataagtgggagtcgaacaataagaacacgtggacacagggaggggaacatcacacactgtggcctgtcaagggttgggggctaggggagggataacattaggagaactacctaatgtaggtgatgggatgaagggtgcagcaaaccaccatggcacgtgtatacctatgttacaaatgtgcacgttctgcacatgtaacccagaaattaaagtatacatataatatatatatatactctctctatatatactatatatatgcacacatatatataagtttagtctatggcggaacactaaccggtctttattgcccccttgtggttgaaagtggaactgtttctatctctgcatttatatttaacacaaggcttcagaataatctgattattacagcagtagactcaattcaaaccagtcatttgacatcatgcaattaaagcatctggatgaatgaatattttttatttctagcaattcttttatcatggtgaccaaagcttagattcataacctttctaaacaaaagtagtctcgagtataatcagaaacaaaggacaaatcaaataagcacctctctttccccaacccaccagttttctaatttatcagaacataaccttttctataatatggcagtatatttttaaaataccataaacaaaattaaaaggcaagatctatgggaggggattgcagaaaactagcaatgtggataagatcaaaggttaatacccacaatataaaaaaagatttccttggaatcaataagaaacaaaaatgaatgttccccaacccccataagggtccattcactcaaggaaaaataaaaatggccaatgaatgtataaacaattactctcaaaaaattaaataaatgtaaatgacagcatgagatcattttttcacccatcagactgcacatatggggttaaaaaggaagataatagtccatacgtttgggtgttggaaagatagtcttcctcttattctactggtgttgatgtcatttgggataagtttctagaggccaatttgccagtatatattaaaattaataaaaaattcataatctttgacctagaaattttactagtaggaaataaacagaggtgagagttaagattgatattaaggaacttcactgatgctttattttatgaaaagaaggcagctgtaaaacaacctaaatgtctagcaataagtgttttattaaaagtttagcaatatgggtaattgtggtaaacccttcaatacaatattatgcaaacagcaaatataatcttagaagaatatatgtcttagagaaaagttaagtactatagatatatattaagtaaaaaagattacagtgtgtgcagtatcaaatcaattttaaaaatacataaatatattaaaatctacactaaaatgttaaaatctgcttatctcaggttaataggattacattacagatgactttaattttttaaatcttgcttttctatttctttcattacttcatttttctacggtggatgtgtatggcttttgtaatcagaaaaaaagaacattttaaagcatttatcggtcactctaagttttctagcagggaacaaatggaaaaagagagaactcagaggctactggcacttgttcatctattaacagactctatgttgagcaatatattacaggacacacccttggatatgtcgtttctaaggcagccaggaacaacgtaagagaaaagagatgatatgagcctgtttcttgcttcctcatgaatgcaccacaggaaagtgtgatttgtatttttactctaatcaatatagctaatgttgaattaagagctatttctttcattaaggcagcatttcccaattctttttatcaatcagttaactagatgtggcacagcttggcaggtctgattaaaattcaggagtgttatagtgagaccattatacatttacccatagttcatacagcacgaaaggaactgacagattacttaaaaatacacatgcttgcacacacaaaacccactgtttaaaaagacatttatatataactgaatcatcattctctgtgtttccttggagaaggcaaagagatttatgaagacacaaagatcactgcagcagtttctatatgactacaggtgacgacgccacatcttgagctgtgaagatgcttattttcactgggaaaatattaagtaacttcttgcccccttaaaaaaaaaccctttcacacattattaccactaccatcactagcagaataagagatccttgctcaccagttttggcaagcatatcagtaagaaggcatttaataatttttcctttattccataaacatgcctagcttttgtcattatcccttccttctcttaaagagaaagtagtaaagaatgagagctcttttggtgatggaaacttgaggaaattaaaatgaccagtttggaaaaagaaaacattagtgaatatcccaaatcatgcacattaacgttttatcaaaaggtgtatgctatgctctgaatctttttgtccccctccaaaattcataggttgaaatcctaaccccccaaggttatggcattataaggagatggggcctttggaaggtgattaggtcacaagggtgaagccctcataaatgggattagtgtccttataaaagaggcccaggagaaaccccttcccccttccacagagctggaaggtgccatctgtgaaccagaaatcaagacctcaccagaccctgaatgtgcggatgccttgattttggacttcctagcctccagagctgagaaatgaaattctgtagtttatagcctaccaagcttatggtattttgttagggcagcccaaatgggctaagacagtatattacagtttatctgccctaaaatcaagtgtaagaaaaacactgcactgtagtaaattttacatttccacagcaaagagagaaaaaaagtgaaatgattatctagatcactgaggaaaaaaaattgctgcaagatctactttgggtaattcaaatgaaagtagagatgtccatcccacctcccagcttgaaattactcaaattgatacctcgattttccagtgtgttttaaaactacagttacaagatggaagacaaattatgtattccacaccttcctgtttctggaaggactatcgccaaaccatttccaaaaaatgagaccgtactgtttcttaagacatcatgaggagatttcccactgggttatgaatgaggcagaaaaacattaaagacaggaagttggcattctgtttttaaaatatcagttatgggccccggtgcattggctcacacctgtaatcccagaactttgggaggccaggtgggtggatcacttgaggccaggagttcaagaccagcctggccaacatggtgaagccctgtctctacaacaaatacaaaaattagccaggtgtggtggcgggcgcctgtaatcccagctattagggaggctgaggcatgagaatcgcttgagtccgggaggccgaggttgcagttagccaagatcaggccactgcactccagcctgggcaacagagcaagaccctgtctcaaacacacacacacacacacacacacacacacatacacacacacacacacacacacacacacacaaagttagctgggcatgctggtgcatgcctgtaatcccagctactcaggaggctgaggtggaaggactgcttaagttcaggaggtggaggttgcagtgagccaagatcaggccactacactctagcctgggcaaaagagcgagaccctgtctcaaaaaaaaaaataatcagttacaaatgagcaaatccttattaagtggcttataaatctatgactttctatattctaaaagttgcatcattatagactagtcaaaatgatttggggtgctgcatttgaagcatggtctgataatgtgttaaattataatcctcagagatggaaatggtacatgtggcaaaaaaaaaaaaaaaaaatctgtttcccaacaaattccccacccccaatttcaactgcccaaagttgcaacaggcaaaagtagacagagagaagagagtgaaatctgtggcagatggaatcaatgtaatgaaactatatatgctgtggaaagatttgtgtccataattttaaaaccgccattatgtatattcaagccattgggtgctaatgtatctttaaaatccaatatgtgagaggcaagagaacagaatatttaacaaaattattctttgcttttcttatttgtttcacctatattttcatgttttcctaaggtctggacaattcaccagtcaggaaaataaagggaatatgtctactctgtttatattttttgatggtttaacatttatcttattttttatgcaacgttgtttattataatattttttcttttatttgtataaatttagggggcacaagtgcagttttgttatatgggtatattgcagattgaaatctgggcttttagtgtacccatcaccagaatagtgtacattgtatccattaagtaatggttttaaattataataaagaaataaagtggaaagttaagattcaatttccagtcccaatacacgtcatgcattagaaagtggttaaacccatgagtttgaggctgctatgagccatgattgcgccactgcactccagcctgagcaatggagggaccctgtctctaataactaaataaatagaaagaaagtggtataaaataaaaaggacctccctgccccaatctttagagtttgcttcacaatcagtatagaaatatctgatcactagatagtggctgcttggagtaccacatgaaacatgatccagaggccacatccagtgcagcctgaaagagtgacttgattaataagtactgtccatcacacccaccaatttctcaaaaagagaaagggagggaataaacacaaacattgtgtgctggttattcaaaatgcactttttattcactttaacacagatgattttttacagttgaaagaaaatatttgatacacaattttgagttttttttagcagcacctgcaacaagaggattgtggaatacctcagaataaagtagagatggctggggcaggcacaaattaacctgatattcatcaatccactgaagacatatggaatctgaggcccctgaaagttagccaatacatgacaataaactaaataaatattctgtatgatgttttaacagaccattgaaaaacagtatagtcctaattagaaatatattattccaaaaatctagtgttctttaaaaaaacacctattgaaaatattacactgcacattctagggtacacagtcaatttctaaacctatatgcacagttcttggtactcacagatttcagcctttggtgttttttaatcttacccaaactgtatgtcagcaccccactgagtgttgcttacccaaatgccactgtttatgtcacttaatgttgagtgctttcattaagatattgagtggtaatttggtagaaaacaatggtatggctaagaggaaaggggctccagctgatgggccaataaaattaacacttgtcttagatggacaggatgcctatgaatccgatacccatgtaatttttttttttttactcaaatgaccacatgccactctaatagagacaaatacttttgtgagttgatagaggtctttatgatgaaggcctgagatctacaaatagaaactagtataagcagagtgcaagtagaaagagaaggccccaggtctcatgcacttaaaaataattagcatttaacagttctgacgtacagattttcaccctaacatgattgtagcaaaatgatcacagaacttggaaaccagtgtggctggctataggcataggcaggatagggaccagtacttaagagctgtggggtcccagttctggctttgacttctggcgtcaaagttaattgaacaatggtgtcaggattatatcttaattggaaatattgagtatgactgagttgaaatactgtcctcttcttttctatttggccaatatgtcccagagctcttaaagcacaaaggtcctacatgtaagtaaggctgattccatacgtggctacaatggagagttctaggctgtattcctatgaaagctcccacccccttcctggcctaggtctctttttggggtaatttctgtctgtcactatttttatcatagatgttttaaagtacagattaaaatctatgcagggtaaacagatcaaccaacaagaaccacactgcatattcataatatagtatataactgacagtcatggtaatcaaaaattgtcaaaccatttttatattttaacatgggagctttaagatgttttttatcagtcacataaagattactcagagctcaagaatttttcctgccacagtgcaaaagcaaaaggaagagctatgtagttgctgttaaagattgatcacagaatggtttgagaatttttaaagtccctctccatagtcttagctgttatcatcagataaatctaaccacagcatggcactgatgtagtttatatattcatagaacttagagccagaaaggactttatattgaacatgtagccagcacagaaaatctttttatggtattctaacagatggtcatccagtgaatattttcagaggcagggagctcactattaaggcagtccattccactgttggacaactctgtttatgggaaattcattctaacactgggttaagatctgctcttctgtcactttcaatgtcctaattaggctagttgaacatacagtgcaacatataagaaaccagttccttcttctgcaataaatatttgagttaaggagccttgtgagaaaagttcattatcccccaatcttttatgaagccttctccatgagcccagcatgttggatcaaaggaccatctaaatgatgagcagagagcactgcatccaaattcatatactaagcagcattgctaaattggtaagaggttgtcagagaagcaacatctctatgcagcaaaagtagacttaggaattaaaagcagaccaaccatttatttgcaaaggtggttggcatatttaagcataatccattcactagtatcctatgacttcaaacacaagaagtataatcaattgccagtgtcattagagtatctcttattgagatgggattttttgaaaagctcagatgggagcgaaccatacataaggatttaaacaagtcagtgtatatcattatacttttgcactcctaatcattacaacttctttaattcaagcctaggaatccttatttgcattattatttttattgtaatacagctcaaagtctgatttttttcccctttggcagaaatgtcagaaactgcttggcaagagtctgatagtgacatttgttagttgattaatggaacactttaagaaatagttgtagctctttaactccttcatgcagctgggttctaggtttaaactgtgatttaaaaaatatttaactgtctcaggactaaaattttctgatatgtcctgagacacacaagaaggggaaatagcagaaatcacgcaaaatacacttggcttgatagagcttcattttttttaatttttaatttttttaaatcaatctacacttcaatttgaaaggctctgtttcacaatcagaaccttgtctcttaccctcttgtgtgcgtgtgtgtgcactcttagaggggcacagttattcttacactactgactgatcaatttggggcacatttttaaaaggctccctatctttaacagcacgaagaccctgctttggagccactgttcaagtcaatggtgtgacccaacatgcaatgctccagctgttcctctacagccagcacctgcctgacagcttcttcaaaggccactgtcacattagtatcatctttggcactagtttctaaataagggtaatccccattctccatgcaccaggtttgtgcctcctcagtagtcacttgcctatcctctttgtctaccttgttacccagaactacaaaggggaaatgctcagggtccttcacatccgcatagtaaataaattctttctgccagttaccaagattctcgaagctctgccgatcatccacgctgaaggtcaagaggcagcagtctgctcccctgtagaagggtgtcctaaggctcttgaaacgttcctgccctgcagtgtcccagatctggagggttacaaagcgtccatctacctccagatctcgatttaagaactctacccctatggtgtgaaaagcctgggagtcaaatttgttggttacgtaacggttcataagcgaacttttcccaactccaccatcacccaagagaatgacctttaagagcagggatttcccactcatttttgcagcaccagaagggaaggagtttgtaaccaagagaacctgaaaataaaaggaaaagtaggagggaaaacagttaaacctgaaactgaaatcaacttcatagcaaatttctctgaattataaggccttctcattcaacttctctgatttatgctcattaattgatgtagtacagcagaagaaataacactaattttgcataaggggaaaaataggtcttgtttttctgaggtcttttgttgtgccaggaaaatggctgagtgccatgggtaaatggactagcagatggtcctgtaatttggttcagttctgacccaattctaggagaggaagcctagaacaggaatgccactcaaatgtgtgacaactttagcttccggtttggacagttccaaacaatagacaaatagtatgaaattgacttggggtttgaagtctgctcctgatggatacaaaaattactgagaagagaaagctacataaactggattcttgattctgtcggtagaggtctgggccagaattagactgcaccccagaatttgaaagagagaacaaggttacgtttcttcaggcatttaccccattatacttgcattgataggaacaccctctcaagtaaggatcttctatatttttttcttcatggaacaatggcatttaagttgatgacaattgactgatatcaatataacagctgtcatgaaggaaggaaatcttgaatagcttattagtttttggattcaggttttaattccataatagcaacatttgaaaacatactgcaaaatttaaagtgctaatatttatacagtaccctacttgttacctccacaacatgtctacacatggaacacctagaatgtgtcttaaaataaaaagatcaaatgcttactgaacaaatactaccttttcctatattctgttaggtactttcccactaggtctattgtgggaactcaacggtgatgaggttaattggatgatatttatacaatagacccaaagggatgaaaacgaatcactaatcgaaggagtgcatgcaaaacagtttctggaagcacacacatttgaatataattttacaaaatttagtagcccttaaaatgattttggaatgcctatgtactagctatatatttttctaaatattcatttttaagagatcaaatattaaaatatcccaaatccacagtgtgcccccttgaaatacctacccagtgggtttttgtcacaatttaaatattttcctttttttcctgttgttgttttattctttctttttagggtgctataaaacagaatagaaaacattattttaaaaaaatctataataaaataacgttaaggctctatataaaaatatattcaagtcagaaaaaaaaaaagaacccacagcaacctcaagtaacctacagagggtgcttttcaaaaataaaagttcaaaatgctacctatgcttaacataagcaaaataattttattccaagaactttaacttatcctaatttgtaatttatataattttttacattttatattgtctctcaattgaattctccattcaaagtaaaagcaaattaaagaaagatgatattcacaatagatgacattcaggaaaaggaaagtacagagcaatctaagatatgctgaaatcctaagtcggagatgaaacttcttccttttatacctaccaacgttcccatctccaagaaagttgttagtgcactcaccagtctgtctcaaggttgtctctgcaattgattccacataattagagagcagaaaaaaattgtgtttgtgggcttcctgtttacaataaagtatattatcttggctaattattttattaattagtttaggtcatttttcttttctttatttattttttaaatttgagacaaggtctcattctgtcacccaggctggagtgcagtggtgcagtcatggctcactgcagcctcgacctcctgggctcaagtaatcttcccacctcagccttctgagtagctgggactacgggcatgcaccaccatgcccggctaagttttgtagtttttgtagagatggggtttcaccatgttgcccaggttggtttcaaactcctgggttcaaacgatctgcccacctcatgttcccaaagtgctgggttcacaggcgtgagccgctgtacctggcagttcatctgtcttaaacaccagttttaatatttagctggtgttattaaatttaaatatacattcatctaatattataattaattatggcaagaatcttatttaagcagcatcaagagtactggtttaagaagaaaaacagtgcctagatctgtgtagtgttatttcttactgaggaagaacgaagctttaaaaaaaaatctgctgcttaataatcacatgttattttctaaatatagataaaacttataataaggattcattagatatctaaatcagtaattatgaatttaaataatatctcctaaatggataggctttatcctccttcttggtttatatacactctacagaattctcaagtttcctacaattcctaatttttgtcctctttttcctgctcccaaattgctgtctttggaattagctcaagtaacaaacatttctttaaatggagatgaaacaagtgttagcacacttttttatttttttatactggtctgtaggataattttacagagcaaaactcttgaactctcattttgaaaagcaacagaagtacaaacttgggcatgattctgatggctagtattaagcgtccaggccacacaagcttccttgagttcctagcaaacaggcgttcacatcattaaaagactcactgaccctattctcccagttgcagataaactcaatagacaggtcaaggactgagtgaatatggaaaccaaatgctcagctccaggaataatgatgatgtattaataactgtctgagataatgctgcagttgcttgtgcattccctatttggttatgtgcacacataacttctgggcctataggctctatgccaagggaaaaagaggaaaagcaatgtggttcagtgtcaagagcactgagctagctggcagtaatcaggacaccagggtcttcatcactgttacaccattcatttattttatgaacttgggcaggtcatttaatctttctgtttcagtatcttcttacataaaaatagagcagataatacctgccctacttaacaggattttgggggagaatgaaaagcttatgaagtttgcaaagatttgtaagcattttttgaaaaatttggtttgagatttttattcctctggctcctccacctcctttcatgcactggtgggggccttgtggctcagtattaacccttctcagaaagggcctgctagtgaaagtataagaattcttccttttctctttcttccatatttgagaatgccttgttcctcaacaagcttgaacatctgcatatggcacagaatctcagcattgaagggaccttcagggtcttctggtccaatcttgctactgatatttgagaaaacactacagtgcctattgtgtgttgtgtccttactaaggaaaccctccactctcctctgctgtctccaactcccatttattttctagaagtaaaaatgaatacagtttagatttgtctccttgccttcattcaatcctgctgattttcccttgaagtatcattttctagtcctgtgctaccatcctcattttggcccacaatttctcacatctaatctattgtgaaagttcttctctccctgcttctggtgtctccccactcaatctactttgcaaagcttcatcactcaaacatccattggatgtagatactgttgggaattaataaatgtttaaggcaaggtcttgccctcagggagtttacaaattaacatgcaagctcaggatctcattgtttacagttgaaataatgtcattatactgacttattttgttaacaaacttttcctgtctttcttacatgatcaattttaaattcctagatagtaagctcactgtatacatctttgaagccccttcagtgtgcagcaccaggatcctccatggagataataaatatttgtttaccaattaaatgattaggtaggtgcccagaattaatgcctctgaattgatgccaaggtacaatagatccatagttctgtaagatgccaaaatactattatttataaggtaactaaagagcagaagttatgaacttgactcgatcattttctggatggggagtaatgggaattccacctgttgaaagtcaagggaaatgctccagttttcctccccctactctcacattttaaaaataagtatatacatttccccattcctacccaaaacaagagcagaataatgatatccagttgatgttgtcggtgggtgctggcctctccacaatcatttatcattgtttgaaaatgaatgtcatgtcctttagtacatacttaaattaaaaagaactagcacagtgtaaaagcaaatgaaatcattttttcctcccccagaatatgccggatttaatccaaacctttaaacaaggtaacattaagcaggcaaatgaattctttgataacactaaatacgtaaataggaaagtcaaatgacgtatgcatcccttatgggtcctctgtcgggcgagcatttggaccaaaacgcttattctgattttgatcccattcagagaaagatctgactctaactgagtaaaatattcgagagacgcaattcccctttcctacccccacaaactcattaatgagcatgctctaaggatagtttactaacttttttttttcccatcagggtctcagtcttggagagtaaggtgaattaggaatttccataaccaatactccccagctctttgttctttaacacacttgaaaccttctgaatctgcagtacccacaaagccttattcaaattattgtatttagttgggaatgcttagaggtgggagtggaggtgggggaggaggcagtacaatgaagaaaaagaagttgaacctttgaaaatagtacattttagtatgatgatggagagaagagaggcagaaaagcaaattcgcatcagttcagttgccatggagtggaatgatgctcaaaatcagtagtgcagattgctcggaggcaagtcttgaaagggatgtgtactgcagggatcgataggggaagagcaactggggagggctaggcactggatgagagtggcactgttggaagtctgtacaggggaggagccatggttggacctgtggggaaagcccatcttgtggcgacacactggtaagggctactcaactcactgttgaatgctggcacaataattggaaatattgcactgaagaattgggcgcggctatatttatgtaaaattcaacacggatgagaaatgattgaatgtttgagtgtgtttccaatacaacccaatacttggcgttggtgctggtggtgggtgcttcgtagcgcggaaaccctctgacgcactggattcattttgcagagctaacaagttatcagctacatccatgccgactccaaatgccacagctgtcatgccactgaaacgctattcctacattcatgcccacatttatatcctatatgcaactcaaagggtccaatgtggagtcccacatctaacctttcactgctcacaacgacagctctagggctataagcccaaaggcacactagatagcaatctggcatcgtccccaggacacttcttcctcagtagactgcccagggacagataggtagataaggtttggatgacatcaagcgagctgaacacaaggaaaaaaagcttccttgggagacaagaatgctggcatctctacgacaggggcactgttagcattacggacctagaaagtgagatgtcacacatagtcccaactacctccgacccaggtcctctcacctcacccccagctcttagagctagtcggctgtggcgcatgcgcactgagccacacccgctccccacggagccctgcgcctctctgctcggctctggcagcagctcgggattactcagcaacgcccccctgcactgtcacctgcccccgactccgacctcgggagcggctcagtcccttttctcaagctacgagtggtcctggggatcaactagactttcctttctccctcttctcacaggccccccacctcccggccttccgggtcctccagcccctagcccctgttcctgcccacgcacaggcaccttacccaacacaatgggaaggaaacaggagagggccgcgggtgccaggcaggtcagctctgcgtgccgggaatccggctccttagagtcaccgtcactgctcctgctgcctcctcgtcctcaatggggcagcaagtgcggcttggacctcggtggcctgacagctgccgctcgcgcccgccgctgccgccgcgcagcgtctcgagcccgcgcccgcgcccgccaggggagggggcggggcccgcgccgcctcctcgtgcccctttctcggcggtggggacccggtgtagccgcctcccgccctccatgtggcaagcgctccctggctcgcccactcttctttcatgctcatcgtccaaccctggtctcccttgtcctccttctcctcccctagccgattagtaggcacagcggcaatagaccgtcaaatattgctcttccacttagctcctctgcagcctgggcctaagccctcaagcagggctagccactgccccacttcctgcaattatcctctgatctacctcatttatcctagctcaaaatcctttaattttgccaagagggtagtacatacaccctcttgtttcaaataactcaggaaaacacatgatcacaacacattgctaggccctctaactggctacagcttatgaaattttcaggcaattaaaaaaaatgtccacatctgtagcgcaggcatagaggacacactgccctttactcttaccagatacagttctagagggccacacagggggcattacttgaatttcccggaattgctgctggggcagaatttgatgttttaattgtgcctagccgaccagctagtctctttttgttgttttctgtagccctctggtacttccaactagtttgtgattttccccctggaattgaagaaggacaaagctcctgaggtcatttagcctgcactccacctctctgtcaggcagctccatctctgaagcttccccattgcccgaaaccctgtgaccttgtggcacaggccctcactcatctcatgaccccgtccaggccctcacacatacccgctacttccatctaggccactcttcctctgtctcttgacaaggcaatcgtgcaatcaatctccgcaggccccagcttaaatgtcacttctcaggataacctttctcgataatctcagaatagagatggtgccccagtttatactcttgtagcctcctgtaacttgctgtatttttccttcataacacttacccatttttggtggtacatttaagtgtatgattatttggttgacagctgtcttccctactaaactatagtggggaaggactatgaggtcaaggacaacgtttgtgttcaccaccgtatgcacagagcctagggcaatgcttgctgcataggacatgctcagaaaatatttgctgaatatgaatgaatgctgtatcactaatagttgttatatttaaataaaataaattgatgtaactgaatctcatgtgctcctatttaaaccaaccccgttccccacacatacactctaaaacactcttctgatgaagacgagattcacacaatcctctaaatcaaattttccgcatacattttagtctattaaaaaactattgagcatgggccccaacatatgtataaggatttatagattatatacatgtactactgtacatgtatacattacacattactttaaacatacattttaatgagtaaacattaaaatactccacagaaattttaaaagaatgagaaaaataaatatattgatgttccaatgttttctttttgcacctcaataaatagttttgtgaaatgctttaaataacagtccttcatattagagtaactcgtctttaggtgtaacaatctagactactttttcattttctcatagatgccattttccaacagtttaaaaatctctgagaaacccccaaaccaactggcaagttttaaggatcttttagtttctaagctacctcgttctgtagtcaggatctcacaactgctgaaagcaccacacgtttagtgaatgttggaacacctaaaggtaagaaaaatcctttgttagaccaaagattcctacatgtaaatcctatattaaaagagtctctagaggccacttaaaaagcagctactattatctttctagaatggaagcaacatgactaacactagttgtgagggatcagcaaaaatggacagcacgaagattcaaagtaacagctgtggatggttttgtggctctcagatgggactattcccaatggtcaatcattgagatctgtcaaatagtgtccttcacacacaataaaaattctatttttataacacagttacacacacacacacacacacacaatagaatcatagtgtagtcggtagatagaaggccaaaccaagattgcgtttggataccagagatagggttaccttcagagtcacacacacacacacacacacacacacacatacgctcttcaacattcaatgaacaagatctcccaaagtctcatcctgatcagtttgaaatacattgacctgagcttcaggaagacataattgtaatgtgattaatttaaaagaacagcctggtccagcagtcacaagttgttatgtacaagagggttccgtgaagcattcaaataagtgtataaacactgcatactatttcccttccagaagagtcacgttgcatattaaaacattaacgtctcttggagtcctgaagtaaagaaatctgttgtgttgtttttcaatcttacatttccaaaacttttgtgaacatgaatttcttttgtttatggaacatctattagcaggactagaacagctcaggacccaatttagcaactactgtcctaatcattaatattgaacatattcataggccaacgtatttgtcatctttgtcctagaatatttatgtggcaactatacacgttatattttccagatagtcctgatttcaaatactttgtcctattgtcctaatttttacaacaatactcatgagatcatctaatgttttattcagaaattatggcagtcatagatatgtaaataggaaattagtaagaatttgtgaactatttacctatcattgtccaagagcaagtcacagtttctggtgatacaatatttttttaaaaaatcatttgacacagggataatattatggaataggaatactttgccagatttttcatagcctgaaggaaagatctcttaagattatccaattatggaaggcatcagtatgaactcagtttagtcatttaaaaaaaatttttaagctctgtccactaaaaatacttagaaacaatgaaaatctcagtgtccaaattcacctatagtgcccataggatggttctaaatgctatttcccaataaaaggacccaggattacttaaataaatggctgacttcagatatgtggcaagaaatatccaagatgaacataaaatatcttgtcacaccagatagcaaggaagctaaaaacattattagagttgagtcaaaaggacttgaagaggctgtcatcagtcaaacacggggcaatttgagcatcagtaaagataataactacaatgaattgaaatatatcaaatatgtttaaatatacaaattcataaaaacacttaaaaacataattgctcaatttggccaaacctagaaagctagctcattattttaaaactggtaaataaagagagtgactcaaacatttaacctgctttttttaaatacaaattattccttggtgtaacaaaggagttggcgaggaaagtgttttaaaaagattcccagctaataaattatgaaggaatgataaaattacaacctttaatgaattagtggatctaggtaataatagttaatgtcttctaacattacaaaaggagtgttaaccatatatcatatgcctcttgatggaaaaacacagcagcacatagaaagtattttttgtcaaaaaatgcaatttgaaccctatcaagctcctagatataactatgaatttttagaaaaatacaaggaaaaatatgttaacattgtagggatgtaagcaacaacatccagacttaggtttagagtgcaggtgtgtgtgtgtgtggtttagagtgcaggtgtgtgtgtgtgtgtctgtgtgttgaggggggagaaactgcagaaaaaaacgtggtttcttcaacaaataaattttaagaaagaatacaaaaatgaaagttaaaaagaatgcatttacaatgacatcaaagagaatgaaatatttagaagtaaattttaaaaaagaagtgcaaaaaaaagaagtgcaaaagtaacactcttaaaaacacaaaactttgttgaaagaaattaaaaaagatctaaataaacggaaagatatcatatgtttgtggattgaaagacaatatttataaggtggaaatactcttcaaattgatctacagattcaacgcaattcctgtcagaaccccagctggcttctttgtagaaatttacaagctgatcctaatattcttatggaaactcaaggaacccagaatagccaacacaatcccgcaagagaactcagccttttcaatttcaaaacttactacaaaactacagttaccaaaatagtgtggtactggcataaggctaacatgtagatcagtaaaatataattgagaatccagaaataaacacacgtgtctatggtcaattgattttcaacaaagctgccaaggccatttaatggggaaagaatagattttttcaacaaagtgtgctggaataacaggatagccacatgcagaagaatgaagtgggaccctcacctcacagcacatacaaaattaactaaaaatggattatactataaaattgttagaagaaagcagtagtaagtctggtcttgagttaggcaatggattcttagatatgacaccaaaagcaagggcaacaaaagaaaaaataaataaattggacttcatgaaaatgagaaatgtttgtgcttcaaagaacactatcagaaatgtaaaaagacaactcacagaataagggaaaatatttgcaaataatatacttgataaggaagttatctagaacatatttaaaaaaatcttacaactcaaagataaaaagataacccaatttaaaaatgagcaaagcatctgaatagacttttcttcgcagatgtacaaatgattaataagcacataaaaagatgctcagcatcattaattataagggaaatgcaaatcaaaaccacaatgagataccatctcacacttattaggatggctataaaaattagataataccaagtgttggtgaggatgtggaagaaatgaagagcataacattcatacactgctgatgggactgtaaaaatgctgcagccactttggaaaaggctggcagtgtcttaaaaaagataagcacagagttaccttaagatccagtaattccgcttccagttatatacccaagagaagtaaaaacatatatctacacaaaagcttttacatgattgtttattgcagcgtcattcataatggccaaaaggtggaaaaatcccaaatgtacatcaactgatgaatgtctaaataaagtgtaatatattcgtacaatgaaatattattcagccttaaaaagagatgaagtactgatacatgctataacatgtatgtatcttcaaaacattacgctaagtgaaagaagccagtcataaaagactacatcttatttgattccatgtatatgaaatgtacaaaattggcaaatgtacagaaagagaaatagattagtgatcacttaggactaggggacaggtagacagggatgttgggggactgatagctaaagagtaaggagtttcatacacttgctgaaaaaaataaggttttacttccctatcaaagaaaatatattcaatcttctgtcagtacaataacccactcgagcattcagttcccagagtaggaaatactatgtataaattctatactgtagataaacagcaaatgtacagtacattaagccacagactggaagggatgctgagggattcatagttattgttagttaaatttattaagggggctaggatagaatatgggtgaaatttgtttctattactatttggaggaggcagttgacctcatgcaaaatgcatggaaccagttgtcagcatgcctgggttttggtgctggctaactctgtcatataggatatatgagaactctgctaaatcactagacttcttggccacaatttcttcatttataaaaagagactaatattacctactctgatatcattattatgttactgggaccaactaactgagacaaagttcactaagcaccttggaaaatgaaaagcagtacaaatataaatttcttacattaattagtcattgtgttttaattctagatagggtagaaaggtgccatccccgttaaagagttctgtaattcttccataagggaattttacaatttgtataatgctttaaagtttcaaaagctatttttgaaaaaaatcatgaccctctctccccaaaatcatgccaacacatgaccaaatgaagagcaagtagaaatagttatttttctgatgaatttcagtcaaaggtaaaataaagtaataaaatacttcatcttttgaaatagctcttactgcgtaattattccagcttgtatgaaaagtgtatgtcatgatctttttgttagtattttatgttgtctatacacttctgatgcatttgtttgaagcttttctagggccaacatgaacagaaatatcacataagttttttgaaataaaaacacaatttaacataatatcactgattacgggaggacacctgttggcactgaaattactgaggatgagtaagctcatggaaaaactcagtcttcaaaaataatgaaaagcttcaaggtttagaagatataaccagtggccttcaaatacattcctctttcgagattatctgtctttagcattctcagttatgagcttaatgccttcttggtcatttacaaggtatcagacagcaaataccaggaaatatgacattgctttcaacttgtgcattatatggtattagtactggtgatgatgccaacagttaaaaatacacttcaggtgcacccactgtccccttctctctttcacccccaactgctaccacaagatagaataactagcacactagaacaagcaatgcagacttaaaaaatgatagctataacctgaaccagtggtcaatattagcctcgcttagaaattgatcaaggacttgcatcaattcacaaagcatttattaaaaaaaatcatctgaatctcagtaagaccagggagatttctggcattttaactcatcctattcccatcctctctcctcacttctgtggtaaacttgaaaaccaacaactcacaatcacactgaaaaccagcagtcttgcagtcactggaggggtcagaatgggactggaacacttccaaagcctcatccccagagaattgtcattatttgactggtctggcagtttcctggaaacccccactcacagagtttctctttaattcacctgactcagagcttgctcatagcagaatactcttttcctcagagcatttgtctaaaacaaccagcagcaattgtttaacattgcagttgcctgtggtaacgataacaatgggagaaaacaagaaattgacataaaaacatagaaggaaaatctgaggagtgagatgtctataggtggcattaatcatttcggtagacacagaaaaagtaggtgacaaaatccaacaccctttccttgataaaaaaaaaatcaacaaactagaagcataaaagaaattcctcaatcttataaaggacataaatgaaaaacccactgtgagcatcacatttaaggataaaagactagatgcttttcatctgagatcaggaacaagacaaggatgcccattctcgtctccaatttaacattgtattggaggttgtagccagggccattaggcaagaagatgaagcaaaaagtatccagatcgaaaggaagaagtaaaactatttttatttaaagattacatgttcataaatatagaaaatcctaaggaatctattaaaaaactactaaagcttgcaaagaacctgaacagtcatttctctaaagaagaatagacatttctcataagaaaacataaaaatggccatcaaatatgaaaaattgctcaacctcactaatcatcagggaactgcaaatccaaaccactatgagatatcacctcatactcactaggattgctataataaaaaagacaagagataacaaatcttggtgagagtgtgaagaaaggagaacccttgtatactgttggtgagaatataggttggtgcaaccattataagaatcagtatggagagtcctaaaaaaatttaaaacagaactaccatataacctagcaaacctactccgaattataaactcaagggagatgaaatcaccacattagaaagatatctgccctcccttgttcattgtagcatcatttgtaatagtcaagatatggaatcaacctaactgtccatcaataggtaaatgaataaagaaaatgtggtacatatacacagtggagtactatttagccataaaaaggagactgccatttgccacaatatggatggtactggagtacattatgctaagtgaaagaagccagacatagaaagaaaaatattgcatgatctcacttatatgtgaaatctttttaaaaaaaggtcaaatatatagagatagagaataaaacagtggttaccaggggtggggagttttaattcaaaggatacaaagtagcagacatgtaggatgaacaactctagagagtgaatgtacaccgtaaagactatagttaataaaattgtattgtattagagatttttattaaatagattttagctgctcttgtcacacacgcataagagtaactatgtaagataataggtacgttaatttgcttcactatagtaactgcttttctatctatacatatcccataacatcatgttttatacctcaaatataagcaataacatttatttaaaaaacgattaaatataagtgagttcagaaagttttcagagtaaaagccaatatataaaaataaataatgtttccatagattagcaatgaacaatctaaaaggaaaattaagaaaacaattccatttataatagcatcaaaaggaatgaaacacttaaaaataaatttaacagaagttcaagatgtgtacacagaaagcaaaaccacatcattgaaagaaattagagaagacctaaataaatggaaagacaccccatgtttatggactgggagatttaaaattgctaagatggtaatattcccctaactaatctacagattgtacacattccctatgaaaatcacatctgcctttttttttttacagaaattgacaagctgatgctaaaatttatatggaaatacaagggaccaaattagttaaatcactcttaagaaagaaaaacaaaattgtaggactcatacttcttgatttcaaggcatactacaaagctacagtaatcaagatagcatggtactgacataacaacagacatatagaccaaatgaagtagaattgagagttcatacataaatcataagctttatggtcaattaataatatttttgatacagaaaacttaaaaacaccaggcatgagggtttcctttaatatattttggcagtccagattaacagaatctatcgagagagaacatggaagacataggaacttctgatggtaagctcagtcatctaagcaaagagtattccttcctcgaccttccccactcctaaggagattcagcattgctctatttagccaaggtcttttaaggcctgtggcagaggtttttggactagggtctatgaataggatcaagtggttcataaaacctctaaaattctaaataataatttatgaatgtgtggatctctacatttttctagggaaaaattctacagctttcatcagattctcaaaggggttcatgaccagaaaaggttaagaatcactcactgaagggtccttctctgggatttaggccagccagcagtcctgaactgccctaattgaaatgtaactggataacttagttgaggcaactatttctttagaacttttcttggtgctatgaacagaccggcttgagactggctttggggcacctttttagtattatataatgtacctaaatcctacctagtcttgctctgctgccatgacttacgcggacctgatattgcccattactatgatggtcgtttcctgcctcatcctggatcctgactagatctgtggtagtatcactattatgttgatgtcactagcacaacctttttctgactattctgtcaggacacttcagtcatcctagattgatgaattaggagaattattatgtcattgacaaaaaaatttataaagcaggagtggagggagaactgcttcaaaagaagttgctgagtttctttgtagacatattaaatgacggtgggacatatgagtagaaaccaccagcagatgctgcgtcatttttgtctactgcctggcccctgtgagaacctgagtttgtgagcactggctataactgaatccttgggaaaaccccagttaggggactggaggagaaagaggattgcttaacaagatcaagaagaaacagttatacaggtgagatcctaaagaaggagacactgcaataaatcttggataagggttctagaagtaatgggataagagcatgagtgaaacaattagttttggataagaggaagaaagtttccagtatctaattagagacagagactcttggagttccaaagatgcctagcccatcactgtcattttccaggcttgtggtatattaaaagaaaataataaagacatgtcaaaacaggatctaaacattgtgagatgtttaaaatgtttatacttaacatactgacacttctatcaccaccaaaatttccacataatgtaatataatatatttacaaaacaaaaaatttaaaatgtaaccagtaatattctttattgtctatggtttagtaataagacacaagtttaaagttgtctaataaatttcattttctttaatcttgtcagtttatgtcaggaattaggactagactttctgaatgtacaatctttctgaaaaaacattaaaagtctaaatagaggccttcaagaatatgagactggtcaaaatggtttttccttttttagagatgtgagacttctgaaacagtaggaataaaaggagggaatgagtatgctagtcttttttcagatatatgatttatgaacacagtatatagtttttttttttgttgttgttttttttttttttttttttttgagacggagttttgctctatcaccaggctggagtgcagtggcgtgatctcagctcactgcaacctctgcctcccaggtttaagcgattggcctgcctactattctggagtggctgtgaccacaggtgcgcgccaccacacccggttaatttttgtatttttagtagagacagggtttcacagtgttggccaggatagtctcaatcgcctgaccttgtgatccgtccgcctcggcctcccaaagtgctgggattacaggtgtgagccgccacacccggccagtatatagatttttagatcttaaaggaaccttaaaac

SEQ ID NO: 58440 - DNA, 1915 bp, Homo Sapiens
atcttctccaaactcccgtccccaggccacacagattctcctcaagagagccctataaggacattggtaaaatgtcactgccttcaggacacactacgggtcacactgatcaagttgttcaaagaagagcaagatgttgggatatttaccaaaggagatttagcagtaggtctgaacctgtcaatcctggcatgcattcttcatcccatcagcagcaagatggagatgcagcaatgcatggtgcccacatggactctccagtaagatacactccctatactatttcaccctataatcggaaaggcagttttcgtaaacaagaccaaacccacgttaacatggagagagagcaaaaacctccagagagaagaatggaggggaacatgccggatgggaccttagggagctggttcaagatcacagttccctttggcataaaatacaatgagaagtggctgctgaatttgattcagaatgaatgcagtgtacccttcgtcccagttgagtttcactatgaaaacatgcatgccagcttctttgtggagaatgccagcatcgcctatgcactgaagaatgtcagtggcaagatttgggatgaggataatgaaaagatatcaatctttgtcaaccctgctggcataccccactttgtgcacagggagctgaagtcagaaaaggtggagcagataaagctggccatgaaccaacagtgtgatgtctcccaggaagctcttgatatccagagactcccattttacccagacatggtgaaccgtgatactaagatggcatcgaatcctagaaagtgcatggctgcctccctggacgtccatgaagagaacatacctacagtgatgtctgcaggggagatggacaagtggaaagggatagagccaggagagaagtgtgcggacagaagcccagtgtgcacgaccttctcggatacctccagcaacataaactccatcctggaattgttccccaaattattatgcctggatggccagcagtcacccagagcaactttatgtggtactgaagcccacaagaggttaccaacctgtaagggaagcttctttggatctgagatgttgaagaatctggtcctgcaattcctgcagcagtattacttgatctatgactctggagatcgacagggtctccttagtgcttaccacgatgaggcctgcttctccctgagcattcccttcaatcctgaggactcagccccgagcagcttctgcaagttcttcaaggatagcaggaatataaaaattctcaaggacccctaccttcggggggagctgctgaagcacacaaaacttgatattgtggactccctcagtgcgttgcctaaaactcagcatgacctcagctccttcctggtggacatgtggtaccagacggaatggatgctctgcttttctgtcaacggggtgttcaaggaagtggaaggacagtctcagggttctgttctcgccttcacccggaccttcattgctacccctggcagcagttccagtctgtgcatcgtgaatgacaagctctttgtgcgggataccagccaccaagggacccagagtgccttgttcaccctagtgcccacagccttctccagctccgtgcctgccttctcccaggagcagcagaaaatgctgccttcgtaacaaccagtgtgactacgtcagagctcctcatgttcttgcatggcccaagatgtatttccctgtgactgaaccaggagatctggctggggctaagaagccgaagcccaactcacagggctgactctcatccttccaaaggggccagttgttctgtgcacttgtccacccctgttacccccaggatctctgttccttttcacaataaagtatggtgtcttgttatgtcaaaaaaaaaaaaaaaaaaaaaa

SEQ ID NO: 58441 - DNA, 2255 bp, Homo Sapiens; identical to SEQ ID NO: 30731

SEQ ID NO: 58442 - DNA, 1330 bp, Homo Sapiens
ggatcaggctagtctcaaactcctggactcaagcaatcctcttgccttggtctcccaaagctgggattacaggcctgagacatagcacctcgcctgatgatattctcttaaaaaaacaaaatataaccttgcaaaggttatactgcctcttcaagaaacatttctttcaccaataaataaaagctacaaactttcccctaataaattatattacgactaatgtcacaggaatgacaatatttttgagctggaagagacctttgagagcctctaatccaatgctctcattttacagatgaaaagaggctgtaaagtataatggaaaaaaaaaaccaacctgagagtcagaaaactgaattttgggcccaactgtcttacagtgaaagcctgtgcaaattatctgcttcctcatctgtaaaatgagaggtttgtactagattgcttccaagatccggttcagctctgtaattcttagtttatggaactgaagcagagataagcaacttgcccaaggtcacacagctagttaatagcaaagtaaagactatcctcagatcccaactacaatcactttctcccctataccatactgcttctactacttcataacaatattcctgtaatttattttaagattcttgaaaattattaacaagcatgaaggagtttatgaaactacatgactgatttctacagctcttctataggaaatgagctttaaatccaaatgcaacaagtacatgaggtctcaagctgggtattattacttactacacttattaatattaaattgaccccaagaaagttatgagaatttatgcttaaattcccaccacctaaaaatccaactcacagaagagattatgtgccatgcaaaattaaaatatgaattgttataagtaatgatacatattataggtataattctaggaataagatgagaatttaaattcttcattttatgttctagttatacttaatatgcattttaaattcaaaagagatcaatttaaacacttttctttcttcttccctcttttcagactctctagctttaaaaacattagaataacttaagcatattacttctgaaatcacgtaaacaattacaaataaaagactatataaactatgctcataatttctcttacaaaattgaaaatcagcccccatagtattctaaaattctgtgctgaaatatattacaactctactaaactgtatcataaacagcatttggttctctaaaatgtcttaagcttattatatttcacagggaatttagcaggatttcatgaagactgatcttgctgacacaggaaaaaaaaaa

SEQ ID NO: 58443 - DNA, 2110 bp, Homo Sapiens
cgcttttttttttttttttttttttaatataaaaataaaactttattctgtctcatcaaaagctaccagctgctgaagcaaacatgaagggtggcgggggggcagggattctagggccccagagtaagtagaccacactgagtcccttttggtcctcctgcctggatagtgctgagtggaaggggaggagctgggacccaaaggtcttggcttaggtgtgggagcagagaacatgagacctcattatggtcctaaatctccaaaggctctactggacaaacaagcttgatgttaagagagaggggaatgagtgacattgagaaacaagatcacccttgaagagctgtctgctggagagcatacacacgatcctggagctgggcctcttcctgatgcctttccagggcttgcagccctgactgctgcaggaagacctgaacagcctctggctgatacaggaacagcagatgcagcagctccaaactccggcctactacttcagtgtcagaaaaggctagtgtgtgcagcaaggcgggaagcaggggccctggccacagccgctggcagtaagcaggacccttttctgcaacattgcacagaactgtgagcaccattacgctcaccacgttagatactggcaacagctgtaagagaggctcaatcagatccagggagagcaaggaggtacagaaactaggactgtttgcagtgaggttgttgaggagccaaaggccctcagggagcagactgggctgtttctggaaaaagaactgcagaaggataaataaggctgccacaacacgctcatctctgagctgcatttgccctcccacagtctccactgctgcctcagttagcaggttgcttagacatcgaagcacggggcatgccagcagctccagtcctgcatcctcggttttctggacagccccagccaagtccaacagcagcaaccccagagtagacagagccccatggccaatgagcagaggattgctgacctggctgcagatgatgtaatgaaggcaccaggcaaactccacagcgaccccagggttgagctttgggccaggttgcaacatttgtagcatgtgctgagggagagtggaggccaagatggagctgctggcagaagcagggggaatgatcttctctggagcttcctcagcctgtagaagctgggacaaggcatatccgagagcttccagcacagccacatggggggactggaagtagacagggtaaggatctgactggaagctgggtcatcaggtcttcagagactttcagccccttggcacagggcagaggctggagctacctaaccaaagtagatggagcatgtggggaggtacaaaggaaaaagcatgggctttagaggcattcaaacaaacctgggctcaccttctgctgtcgtgtgctatgtgcttacttaatctgactcttagtttgtttttgttttcttctgcaaaagggaaataataaaattatagtctttgtaggagcaatgtgaggactgaataagacaatgagtgtaaagcacccatgatagtgcccggcaatgtgaaacactccaataaatgaagtaattattttaataatggcagttagggaatgtgcaatgtgcttttctttgttgtgatttccagtaccaaactgctctgcctttgcttaaagaattcaaagacacacataaaaatgtttcactgtacaaggttctgctcaatgatatgactcttagcagtagtaactatcttttcaaatgctctggtggcctggcaaaaaggctgtattagtgacaagttggttactctctgaattcctgcggcctttttaacctatctggagaaagacaaggcacacttccctggtttgttaactgtgaagaagcagaagtgaagagaagtggacctcgtactgatgatgacatgaacacttacaagaatccaaaacagctgttgtaactctgcagctcacccttggcatggctaaagaggggtgggtgtggccagattatatgttgttgatatgcacagtcatgtgcaatggacactcacttttcaatgaatatgttttctacaaaaaaaaaaaaaaaaaaaaaaaaaaaaaa

SEQ ID NO: 58444 - DNA, 1569 bp, Homo Sapiens
gcttttttttttttttttaattgcatcaattctccccgttgcttactgtagcacataaagtgcttcaagatttgtacttcccctaccgttctagcttactttccttccgctcctcacgtgtcctgtattcaagtcttactgaacattctccatcacatctgagacttttcacacctccctcccacacccagcctactgggtggactcaggcatattccctaagacttagttcaaatactaatgactctgtgaaatttctgtctgctttccttcccaaggtaggattaagtgcctctccactagctgccctggtctccaccattctatgtccacacttctaagacagtatgttgttaatactgttttgtagtatcatatattgtagttgtctgtataaacatcttcctttataatatttctcactttatactacttcttcagaaaaaaggattatatattatttcacctttgtagcctgagggcttagcacatcgcctatcatttctatgtagtaaaagaaaactataactttcaggacttagaaaacaacagctattctaagaagtgtctcttgcccaaccagagaaggtataagtctcttaaccagtagtctgtaccattttccagaccctgaggaactgctatactggctattcagtttgtcctacccgttggacaaacattaaaaaacaactttttttcttaagaatcaaactttctgtgcttcccaactccctaaaatgccttaggatttttccacttagatttagtttgcaggttaagttataaatgtctacaaaacaactgctttgcaggaaaatccctgaccccctaagaatgatctctctcactgttccagacagtccattttataaggaagtgacatacctcctcatcagcactcccctcagtatacccaataatacaatcttaactccattattgagagtcaaaagacttgagacgttcaacttatttgagcctacatttccttaactataaaaagacaggtatatgaacaactacctcccagggttattgcaaggattcatttcttaagaacctattatactaagggctggtcatggtggctcatgcctataatcccaacaccctgggagactaaggcaggaggaaggatagcttgaggtcaggagctcaagaccagcctgggtaacaaagtgagacccccatctctacaaaacatgaaaaaaacagctgggtgtggtggcacatgcccgcagtggtggcatgtgcctgcacgtgcagtgcagctacccgagactggggtgggaggatccattgagaccaggagatcaaggctgcagcgagctctgatcactccactgcactccagcctgggtgacagaccgagactctgtctttcaaaaaaaatttttaactaaaaaaattttaaaagaacctaatgtgcacactaggcactgttctcaatcagtgctggtgatgtggcagtgaatgacacaaactccctgatcctgaaaagcttttattttacccagtgtggagttgtgagaaataaatgagcttacccaaataaaatgccagatc

SEQ ID NO: 58445 - DNA, 484 bp, Homo Sapiens
ttgtctgtcaatgtacattttatattaaaaaagccaaaataacaatggggtgagaacaggaggccactataccagtggccaagagttcagatccttggaggccgtctttggagaggctcaatgggactcgtattctggcagcagcacagcaccgtgtgggacacaggacaccctccccacacctgagctttcacccacaggcaagggatgtggcgagaactgacgggcacacgtgaaaacagtcagccttgcccggcgctctttgaaggagagctctaaggaacacaagcacacagggctgagtcagcttttacccagcttttttaacttacctaatttttaaaaaattgaaaatggctgggttaaaagactaaaaaacctcggttgttgcaggtcaagactgcctgaaccctgcacaccaggactagggccagctaggcagcccccgaatgccactcggacagcacgtgaatgcctgtaaaga

SEQ ID NO: 58446 - DNA, 574 bp, Homo Sapiens
  misc_feature (522)..(522): n is a, c, g, or t
gtatgaacaatccattggtcacttagacccctatgtaaaaataaaagaatcctcaaggcatgaaaacaccagtaatctgtaatctgcaggactcttcccctgtctgggaaaatatttgccacaatttgcctcaagcaaattcttcttggtcactcaaggctaagaaaaaaattcagattgtaagagttgtaattttttctctctctcttttttttttttttgccagcaaactaccattctggtggcaaatataaaagtgcagaatatatggaccacgaggccgagcatacaccactaacaatggtacatctgcctgcccaggctgcttgggagtctctggaacaggctttttaatatttattctacaatataaatgtaggtataacctattatataaaccatcttaaacttaaatctccatgtacaaaaaagactaagaatatctaataataactagtgcagtgcgtcagtttttgttttttttttgttttgttttgaaagaataactaggtaatatatganactagtttcacactctctggttggtaaaagagatgctgggtgagctacagta

SEQ ID NO: 58447 - DNA, 2044 bp, Homo Sapiens
ctggaagcgggcgagtctcgtgctgtgtcggacctgcagcccctggccttccgccaccatggagtacctcatcggtatccaaggccccgactatgttcttgtcgcctccgaccgggtggccgccagcaatattgtccagatgaaggacgatcatgacaagatgtttaagatgagtgaaaagatattactcctgtgtgttggagaggctggagacactgtacagtttgcagaatatattcagaaaaacgtgcaactttataagatgcgaaatggatatgaattgtctcccacggcagcagctaacttcacacgccgaaacctggctgactgtcttcggagtcggaccccatatcatgtgaacctcctcctggctggctatgatgagcatgaagggccagcgctgtattacatggactacctggcagccttggccaaggccccttttgcagcccacggctatggtgccttcctgactctcagtatcctcgaccgatactacacaccgactatctcacgtgagagggcagtggaactccttaggaaatgtctggaggagctccagaaacgcttcatcctgaatctgccaaccttcagtgttcgaatcattgacaaaaatggcatccatgacctggataacatttccttccccaaacagggctcctaacatcatgtcctccctcccacttgccagggaacttttttttgatgggctcctttatttttttctactcttttcaggcgcactcttgataaatggttaattcagaataaaggtgactatggatataattgagccctctggtccaggtctcagtttacctaatattacctcagaaaggatatggagggaagatgatctttttgccaggtctgacttttcttcctgctccgccctccattaacgctcagtaccctttagcagctgacggccccacgttctactccatgcttggcttcctttccaactagctctttcatatattttacttgctagtatctccattctctctaaagtagtggttctttttgcccttaaacttaaatttttaaattaattaacctgaattaataatacatgcacttaatgtaacatgcaaacagtacaaaaacatgtagtgaaaaatatttcttccagagctgggtgtggtggctcatgcctgtaatcccagcactttgggaggccgaggcgggcggatcacgaggtcaagagagcgagaccatcctgaccaacatggtgaaaccccgtctctgctaaaaatacaaaaattagctgggcgtggtggcacgcacccctagtcccagctactggggaggctgagacgggagaatcggtcgaacccgggaggcggaggttgcagtgagcctagatcgcgccactgtactccagcctggcaacagagtgagactccgtctcaaaaaaaagaaggaaaaatgtttcttccatccctataatccagtcatctgcttcctgcttcccttcctggaggaaacttcagctactaatttcttatgttttttaagagatattctgttactgtgtaaagtatacatacatacagacacatgccccctttaaattttttagatttatttatttatttagagacagggtctcactctagcccaggctggagtgctgtggcgtaatcttggctcactgcaacctccgcctcccgggcccaagtgatcctcccgtctcagcctcctgagtagctgggattacaggcgcacaccaccaatgcccagctagtttttgtgtttttcatagagacagggtctcaccatgtcattcaagaccagcctggccaacatggtgaaaccccatctctactaaaaaaatatataacaattagccaggcgtggtggcacacgcctgtaaacccaactacttgggaggctgaggcaggagaattgcttgagcccgggagagggaggttgcagtgagccgagatcatgccactgcactccagcctggctgacagagcaagactctgtctcaaaaaaaaaaaaaaaaaaaaaaaaaaaaaaaaaaaaaaaaaaaaaa

SEQ ID NO: 58448 - DNA, 3597 bp, Homo Sapiens
ggcacgagcggcgccgccgcccgctagtccgccgcccggcgccatggcgggctgcgcggcgcgggctccgccgggctctgaggcgcgtctcagcctcgccaccttcctgctgggcgcctcggtgctcgcgctgccgctgctcacgcgcgccggcctgcagggccgcaccgggctggcgctctacgtggccgggctcaacgcgctgctgctgctgctctatcggccgcctcgctaccagatagccatccgagcttgtttcctggggtttgtgttcggctgcggcacgctgctaagttttagccagtcttcttggagtcactttggctggtacatgtgctccctgtcattgttccactattctgaatacttggtgacagcagtcaataatcccaaaagtctgtccttggattcctttctcctgaatcacagcctggagtatacagtagctgctctttcttcttggttagagttcacacttgaaaatatcttttggccagaactgaagcagattacctggctcagtgtcacagggctgctgatggtggtcttcggagaatgtctgaggaaggcggccatgtttacagctggctccaatttcaaccacgtggtacagaatgaaaaatcagatacacatactctggtgaccagtggagtgtacgcttggtttcggcatccttcttacgtcgggtggttttactggagtattggaactcaggtgatgctgtgtaaccccatctgcggcgtcagctatgccctgacagtgtggcgattcttccgcgatcgaacagaagaagaagaaatctcactaattcacttttttggagaggagtacctggagtataagaagagggtgcccacgggcctgcctttcataaagggggtcaaggtggacctgtgacgggcagtggccccggtgaccttggggcctccgaccctgtgcagcctgggacaaaactgtttccggttggccgctgccacatggattttcttaatcgttttatgtcattagtcactcttctggaatgtcactcaagaccaagcggtcagaaggcctgaggacccaaggccccactggagcagtctgtccttatgccgaatcaaggcggaacatgggtgaaagacgagtaaggggcaaatcacagcaatattccacagcgccctccagagttacctggggaggaccgaggccacacgccactgcccccgaggccagagtgtaagtaaaggataaccaggactcgctgggagagatggactctgtcctcagcaacactccacagcagaaaggggtagcaggtaccccttcttatcagcggtaaaaatgcatttacaacctttcatttaaccgaaaaacacagaccgctttaacctctttatttctgtcccccactgcatgaacatctatacaattttaaaaatacttcctcataggatgctttggcccttcatctatttaatcatagctacatacctatttttttataagtagcagtacacattcaaaggggtattcctagctcaatgcttggtgttctagttcaacttttatcctgcagcaagtaagcctagataactctacacgatttggctgagtggctttgtgtgaccgtggccccaggccaaggggaccatggccctggctggctttcccccgggggtctcagctcctgttgtcagtgataggcggctcaaaggagcatcagtttcttttgatccaagaagtgcttactgaatgcctgccctgtgcgtggccttaaacattgagaagtgctgctctccgtttatttgggatttgattctcattttaccatagcttatattctcaatttcaatgccagtctcagaactcttgttttctgtgttctgttctcaaaattacattgtccctcatgtcatttcaaactgttttccaaagggatttgagcatatacaactacaaatccaagcagattgactctcaaaaataatcttaaatactgcaaatagtcccaactaagattcagtcagtatgtttgttttgcaagtttgggagagtaagttggctttgagtcacacatcgaagctttaagaggtgagacgctggcttcattctggactagacaggaacttggcctcagcgtgagatcctgccatgcagtgttgcggtggcactgaagaagtgtgaatgtgaaggcggcgtcggcgcggggccagagcaccactctgctgccccaccacgcggcctgtgaggagccactaaacctttccgtgcctagacctccccatctgtggaatggggtcaataccacctacctcacaggggtgttgtgaggactgagaagaacaatgtcaaatgtttttaatactcagatgtgggagcgacatcaatgaaatctgtactgtatgaaagctacacaaaaatgggcagacatttggttaattgtgccagatacctaaaatgtatgttcagaaaagcattttatcaactcagaaatatgacttatttctagattcatggcttaatgaattttttcattgttatatataccaaagaggcttacgggttcattgattggtttgaaaaccagacagacggccgggcacgcctgtaatcccaaagtgctgggattgcagcgtgagccaccacgcccagccaagatgaactccttaaggacaggatttggtaagtgattgacttctttttagttccatgatcttgagattatttttagctttataaatttagcagtggcagggcccgtggagaatcaggttaatgaggtaaaggctttctgggtatttgctgccaaggccacatcaccaattttctcgatttaaaaaactgtcaagagatttatttttccattgcaggttttaaagtggagattctgaagtggaaaataggtactgtcagaacaaagctacctggaaacagcatagagtgaagcctttcgtgagggcttgcaggccgctgctgagtggcagtttacagaagaggtcgcggggtgagcctcttagcaggacagaaaacaaggcagcagcgcacctgccaccccttcacgagctgctccttgagcctaaaaagtaggctttattcatcccttctgttcatttaccaacctgggggattgatacgaccggggaaaatgttcctaaaccaggaagctgcgttagccgatcaggctttgtaagatctcgccaacagctagctgcttaggagtacccccacgatacgcacagcacaccactgtcccttcactgcactttcttcctgccttaggtagttgggcttgcccaccctagtttgcttttgtagtggtttggcaaggttagaaggcctcggcctctctgtcatgctgggaagtgcctactctctgggccactgctgcagaggccgtggcacttgtcatgggtttggaagacccagccatctgcagcagaggcagcctatcccattgcaaggagaggaactgaacggagtaattattctactcttctttttacataaatgtttatttaaatattctaaattggattttcattcacagatactgattattctttccagttcttaaataaaactgcacttgatttcactcaaaaaaaaaaaaaaaaaaa

SEQ ID NO: 58449 - DNA, 1361 bp, Homo Sapiens
ggcgattgcgaatcctccgctgaggtgatttggatatccctagaacgttgagggcacgagtcgggtcctgagaccaggtcctcagccagcagagccacgttccttatgagcaccgtgggtttatttcattttcctacaccactgacccgaatatgcccggcgccatggggactccggctttgggagaagctgacgttgttatccccaggaatagctgtcactccggtccagatggcaggcaagaaggactaccctgcactgctttccttggatgagaatgaactcgaagagcagtttgtgaaaggacacggtccagggggccaggcaaccaacaaaaccagcaactgcgtggtgctgaagcacatcccctcaggcatcgttgtaaagtgccatcagacaagatcagttgatcagaacagaaagctagctcggaaaatcctacaagagaaagtagatgttttctacaatggtgaaaacagtcctgttcacaaagaaaaacgagaagcggcgaagaaaaaacaagaaaggaaaaaaagagcaaaggaaaccctggaaaaaaagaagctacttaaagaactgtgggagtcaagtaaaaaggtccactgagaaaagaatagagattccaactgacagaatctgccagaagctcccagggaataatggtggcgagttccatcaccagcattattatagtgcttcaaaagaaatatttttgatgaacttaaaagacaacaaatttatttaaatggtgcactaaactgtagtgaacagagacatgcacgattcaagaataaaactcggccaggcacggtggacggtgcctcacatctgtaatcccagcactttgggaggccgaggcgggcggatcacttgaggtcaggagtttgagaccagcctggccaacatggtgaaaccccgtctctactaaaaatacaaaaaataaaactaggtcaagtgcaatgacacacgcctataatcccagcacctggggaaactaagacaggaagatcacctgagcccaggagctcaagattgcagtgagctatgaacaccactgcactccacctgtccacttgttcttgtgtgacagaacaagaccctgtctctaaaaaataagataaaaccataaagaaacacagtcagtactatacaagaataatggctacttctagagggaaggagttgtcattgtgatgaggcacttggaggggttctggggtgcctgacaaagttctgtttcttcacctgggtggtagttagaagggtgtccccgtatttcaaattgtacctttgtgagattgtatgttttgtaataataaaattttttttgtaattagtaaagtcaatttttatggagaact

SEQ ID NO: 58450 - DNA, 2908 bp, Homo Sapiens; identical to SEQ ID NO: 23527

SEQ ID NO: 58451 - DNA, 1326 bp, Homo Sapiens
tttttttgagatgaagtctcactctgtagcccagactggagtccggtggcacgatctcagctcactgtagcctctgcctcctgagttcaagtggttctcctgtctcagtctcccaagtagctggaactacagaaaacagaggaaaaatcaggatgatgacgatgatgatgatgatgggttttttggaccagcccttcctcctggatttaaaaagcaggatgattctcctccaaggcccataataggtcctgcattgccacctggtttcattaaatctacacagaaaagtgacaagggcagagatgatccaggacaacaggaaacagacagcagtgaagatgaggatattattggaccaatgcctgcaaaaggaccagttaactataatgtaacgacagagtttgaaaaaagggcccagagaatgaaagaaaaactgaccaaaggagatgatgattcatctaaacccattgtaagagagtcatggatgactgaacttcctccagaaatgaaagactttggtcttgggccaaggacttttaagagaagagctgatgacacatctggagatcgatcaatctggacagatactccagctgatagggaaaggaaagctaaggaaacacaagaagcaaggaagtcatccagtaagaaagatgaagaacatatattatcaggaagagataagagactggctgagcaggtatcttcatacaatgaatcaaaaagatcagaatctcttatggacatacatcataaaaagttaaagagtaaggctgctgaagacaaaaataagcctcaagagagaataccatttgaccgtgataaagatctcaaggttaatcggtttgatgaagctcagaaaaaagccctaataaaaaaatctagagaactaaacaccagattttcacacggcaaaggcaatatgtttttataatgataggtattattagaaaaaagttatttcttgagttacacctaagaggaagaagtaacatgatggaaagtggttggagatagcacccaattaacatcgacagccaagtcttctatttcagaatattgatttatttcgctttggcttttgatgccatcatgagatttaagtctgcagtttcaaaagctcatgctacttagaagagatgatttttgcagcttaaaaaattgcttgtgactgcagtatgtacacagttaaaaagctgttcactgcccctttcaaccttttcattttgagctttactaagagaatgcttttaggaacagaattcctaaagtgtaattttttatgtataaataaagttttatctatatctgaaaaaaaaaaaaaaa

SEQ ID NO: 58452 - DNA, 2572 bp, Homo Sapiens
gtagatgtctagttattcctcatgtaaaacacaacatttcaaccctgagtactataaactttattatgcttctaggttactttttctctttaagcaattattcctacattcctaagtgttcaccagtggaacagataagagatagaagtagttagaaattgagataattgggttgacctgtcattgttgccaggataattactggaagattaagcctatctgttagacattttgaccatgtttataattgttgttagtattctgtcagaatgtatctgttttctagttattaaaagaagcaacagaatcgaggcacaaatatgaagaaatgaaacaagaagaagcacaactgaaagagcagcttttcctttatatggataagtttgaagaattccagactaccatggcaaaaaccaatgaactttttacagccttcaagcaggaaacggaaaagctgacaaagaaaattaaaaaactggaaaaagaaatggtaatatggtataccaaatgggaaaataataatacaacacttctgcaaatggctgaagagaaaactattcgtgataaaaattataaggtctttcaaataaaattggagcggttagagaagctgtacaaggctcttcaaatagaaaggaatgaactcagtgagaaactgggaattctgaaagggcaggtctctgtgaaagtagcagatgtagatttagcagtgcctgtgacgcattcctgtgctgacctggattcttccaatatgctgaacacttcctctaaaagagccccaggagtccatctggaggctgaccccaaaggaatgaatgaagtaaaatgctactcaaaagccctctccacaggatctcctctaggcattgattaagattaagtgtgatcattgtactgatggatatattttgtgtacatgtttctcttttagttgtaactattgattttgtaatgaaaatttcctctcctttttctaccatatctctgtttttttagaactactcaactgtgtggtaacagaaagcttcttaccaatttccccaactatgttgcacatcagcctcattttccccctttattggaatgcatgttttcattgccttctcctttcaaagtgtacgtttgtgtgttcatcaccttaaattatcttaatttgagacttttttataatggtttcgtaatgtgaaatcaaatactaatttaaactctggagcccataatatctacataaaagaaaatataaactgactaatattgtcaagtcatttaaatgataagtaaaacttcaatggattaagaaacaagcatggcatatttgattcagatcagttttttgacaatatttgtatgactttccaaattgatgtgactgtaaactttgaattcctcaaaattgacagaatatatatatatatatatatatatatatatatatatatatatatgtatgtacacacacacagagagatcatttaaatgtaaatgatgttaagaaaaaccaaaacagtagcatatgcaggcaagtcattggaccaataggcttaatatttatgaaactgacaattgttctgctttagtttcaggttacaattatgtttaaagaaaaaaaaatcagtatctagatctctgcacttggcatggaaaattttgaactatttattccttaattttcttttatttcagtttctcatagagctaaatggttttacatatattctcttgtcagatttgtggtctaatagaggtagaaaatggaaattttcccagtacttagaaatatggtacttaggaagaagtctaggatgtgaattacatatacacttcccctagtgactatgataatcaagggggcagatagcagaggaaaataagttaacatgaaatttgacaaattttattactttgccaaaattagcaaaacaaaaatactcaccttcccctgctcaccccccaactttttataaatattcaattcagctacaaaacaaaatactggacccacttctttcagaagagatgaagataccttatatgccctaaagttaataccagcagtcatattttatcagatgtaaatctggatgtaagctcttaatgttatactaaggcagtttcttaggctgtgacacttctttgtggtacttgttttgtgtgaaaggtaaattttggggagaaaacaatgtgaaaaacagaacttgttctgttgtttttggcatactgtttatgttagatacactgtgttacaatacaatattacgaagatctgcattgtattttggaatttggtttcctttcagaattattgctctggctagcattggaaacaacaacaacaacaaaacccaaaggaaccctttgcagaagattcccttgtaaatggccctgtggcatgcccagtatctgcaatgttctagaatagaagttggcaaacctctctgtttgccaagcctgcagagttgaacatgtccataaatgtatacaatctgaccctgttttttggccctgtttctggacactgtagctgaccaagaaaatgtttaaatgttgcgatcaattaaatttttttgttgta

SEQ ID NO: 58453 - DNA, 2984 bp, Homo Sapiens
ggcacgagggacgtgttcgtcttttcctactcttgccaagagggagaaaccaaggagctctggtcatcaggtcaccatctcaaggcctgccgagctgtggccttctctgaagatgggcagaagctcattactgtctccaaggacaaagccatccatgttctagatgtggagcagggccaactggaaagacgtgtttccaaggctcatggtgcccccatcaatagtcttctgctggtggatgagaatgttctggccactggggatgacacaggtggtatccgtctctgggaccagcggaaggagggccccttaatggatatgaggcaacatgaagagtacatcgcagacatggctctggatccagccaaaaagctgctgctgacagccagcggggatggctgccttggcatcttcaacattaagaggcgtcggtttgagctgctctcagaacctcagtctggggacctgacctctgtcactctcatgaaatgggggaagaaggtagcctgtggctccagtgaaggtaccatctacctcttcaattggaatggctttggggccacaagtgaccgctttgccctgagagctgaatctatcgactgcatggttccagtcaccgagagtctgctgtgtactggctccactgatggagtcatcagggctgtgaacatcctaccgaaccgagtggtgggcagtgtgggccagcacactggggagcctgtggaggagctggccctctcccactgtggccgcttcctggccagtagtggccatgaccagcgcctcaagttttgggacatggcccagctgcgagctgtggtggtggatgactaccgtcggcgcaaaaaaaagggaggaccactgcgggctctgagcagcaagacttggagcaccgatgacttcttcgcaggactgagggaagagggagaagactccatggctcaggaagaaaaggaggagactggggatgacagtgactgaaggaatgaattgaatcttgagacgggtcctcaccagccccagcagaccacaggaggttggccccagactcactgagtgcctgcagcagccgtacagacacagcatccttggccacctcatgcccatcccggccatctagggtcagcacaacccagatgaggccgctgaagggcaccggatgcccaggaatcaccacctggtaccagaagcggtgccagccagcaggtcctatgcccaaacacttgctatgctcagtataaagtgccgggcagaacgcgtttggccccaaccagcacccccgccccagcctaccttccaccagggcctttttggccatggcagcggcccggtgcgagctgaatttgagcagagcgatctgcccgggcgccggtccggggctgggcagcagccgcgcctcctgcaagccgggacccagcggctgcagcgcgagcagcagcgcgctgcgggtcagattcggcggcaggccgtcaacgctcagctcacacttctcggtgctgcggcacacgagcagcgggcaggacggccgcagcggatggttgtgcagcgtggcgatggcggcctgcgcgccgcgcctcgagctgtagcgggcataggcgaagccgcggttcaggccgctgaaggtcatcatcaggcggaactcgtagaggcggcccacgcgctggaacagcgggataagctggtgctcgtacacgtcctgaggcagccgcccgatgaacacctctgacccagctggcggcgggctgctcacccagcctgtgggaagagggtatgcaaggccaccgtcaggcgacgctttcgaattctgagcccacggacccagcgcgcgggggtgaggcgatgtgaacaaaggtctgtgaaatgggtttacacccgtaccctgggtggttggcataattaggtgactgcgctaacaagggggctggcacagagtaggtacaccttgagattggccccctccctcgacggggcgggtggacgtggagccacagttcctcctttgctggggggtataaatccgggtagttcgcagtttctgacagtgaaggctcggagcagcccctcccccaaagggggctggtgtagccggacaggcggaggggctgggactaccgtacctgggggtggcccgccatacttcctctgcccgttcacctgcaccaggcggatgcctgtctccctgacccacgcctccagcgccgccttgttctctggattcaccctctcacaccacagctgagagggaaaggaaggttggaatggcggatcgccaagcgcgcccccacctctcctgtggtactggggtccctaaagccgacccccgctccggcggggctcgccggcccccaagtcgccagccgcttacctcacaatcccgcttggactgcatggctctccagctggccccctcgtaccctctttataacttcctccccaccggcctctggaagcttccctacccctccaccccgcaagctctcattggctctgagcgcgaccccgcctcccaggggggtggaggtatccactgcacgtgcgccgcccgggcttcgctcagaccttcaggtgaaagctgcaaagtcgcgggtgcgtatgtacgggggctgcctcccgaggaggagctcccaagccgcagggtggacgctggagacaagaacctcagggtcacaagtttactgtttttctcccttttccatccctacattggtctgctggggaaggcggggctaggcatcactgacacacgcagactccgtggttgaggcattttattggacctttggcaattggtggtggggaggcatctgctccaactggtgcggggccctgcagatgggaccatctcaggctgggtccttgtagcccaggagcacagactggactaagcctcctgggccttgtatgaaaaaggtgttgtacctggccgtttttgccagtaataatcaataaaataaccataataaaaaaaaaaaaaaaaaaaaaaa

SEQ ID NO: 58454 - DNA, 1631 bp, Homo Sapiens
ggcacgagggcggattaggaagaggagggaggggggagagagcgcgaagagggaggggaccgaagctggagggtcccgagtccagcgccgtgttggcgtagagaaactttccctctcggcctcggagacggcgccccggccgtgccggagtggagatcgccaggctcggaggaaccggcagctctccacgcccctgcccgaagcctgacccgactgcctctctcagtgagttatttatgattccatctgatatacataggagagaaactgatagaagaattctgatggcaactgtatgatagaagctatataaagtcaagtgtccattttctttcaactatatttgagcatacccaggatttaagtcgtggaactgaacatttatttggctgatcctcatcatgaaccgtgcttttagcaggaagaaagacaaaacatggatgcatacacctgaagctttatcaaaacatttcattccctataatgcaaagtttcttggcagtacagaagtggaacagccaaaaggaacagaagttgtgagagatgctgtaaggaaactaaagtttgcaagacatatcaagaaatctgaaggccagaaaattcctaaagtggagttgcaaatatcaatttatggagtaaaaattctagaacccaaaacaaaggaagttcaacacaattgccagcttcatagaatatctttttgtgcagatgataaaactgacaagaggatattcactttcatatgcaaagattctgagtcaaataaacatttgtgctatgtatttgacagcgaaaagtgtgtaagtatcccagatgttgtagggtggtttgttctgttttataagccaggaattgtcttgcttctggcattggcaaagtatttgaaaatgaataattttctgtaaattattctgtaaaaagtctgtaaatacttagctgtactaatagatttattttgtcatgagaatatgcttcaggatttcatctgtaactaaattctcatggtcatgagcataaacttacatgtaaatttcttttattagaatgccatgcctgcttatgttatgcatgtattttataataatttaatctattttacaattttaaactcaaatatgatttagtattatgcacataatacaaacagtagtggtgagcaaacgtgtgtttcccccacatgtgcagaatatgatggattttatgaaaataaatattcttaactccaggaaatatgatctatatggttccttaaaagattttccaatacactgaaaatttagttccttatgttcattgtataaaaatcttaggccaggcgcggtggctcacgcctgtaatcccagcacttcgggaggccgaggcgggcagatcatgaggtgaagagatcgagaccatcctgaccaaaatggtgaaactctgtctctactaaaaatacaaaaattagctgggtgtggtggtgtgtgccagtggtcccagctactagggaggctgaggcaggaaatcacttgaacctgggaggcagaggttgcagtgagccaagatcgcgccactgaattccagcctggcggcagagtgagactccatctcaagagaaaaaaaaaaaaaaaaaaaaaaaaaaaaaaaaaaaaaaa

SEQ ID NO: 58455 - DNA, 1884 bp, Homo Sapiens
cgggagcggggacccgagcctgcagccgagctccgctgccggccctggacactcggctcagccaagcatccttcctgggggccgaggaagtggggccactctgccgttccgaggacctgggaggagccctcggtaccccgggccccggggccctggggcacacacgtccagcccagcccgagcctgcgtttcctgagccgggatctggggcgagatggccgcaggcggcagtgcgcccgagccccgcgtcctcgtctgcctcggggcgctcctggccggctgggtcgccgtagcccaaggttgaactcgccttacacctgtaaccggtggacttccctacacacctttgcaagtcttcctgtgccgaccagcgccttcaaagcggggtcttccgcctttacttttggaaaagctttttattttgaaatacttggctgacttacaaaagacttcccctcacacttgacatgattgacaaaaggtctgaaatgcttcatctatggtctgctttgctacgaaaaaagaattggaggggtgcttacaaaaatatgtagaatgtaaaaagattgaactatttatatatatttgaatttaattcaccagcatgcctactgtgcatgcctactgtgtgctgggagtgtgacaagctgggaggaggctggggtgcagggagaggagatggagccaggaggtggtgaagtttgccaggatgcaggcagagcgctactttttgtgttcccgggtctgctccacccaacgggtctcctcttgcacgtttctggagatgggttgtaaagtatgctggagcttcttagcagcaagtgccaagagttcctaattattaggctcatacaattttattttgcttttttttttttaaccaaccatttaaaaacaataacatctctagatttccagtttatctggaaaaatctgaaggtctggcaacacggggcctgctttcccagttggaattgggcagtggtcatcctcttatctagggcatatgagcccaaatttgttccacctctccctgttgtaatatttgccccgccaccttcagtcatgggtgttacctgctggccctgcaggcatttggctgagtaatcactgtgctggggtgtgggtgatgggggaggacagttcctagttggtcatctctggacgtgaaaggtggttgtcaagtattcccatctccccagctgtttgcagtgtttcctgcacgatgaacaccaggaacctgggaagtgagaagaaccctgggatgaagtcatcctgctggaatgacctggctttcaggctgactgccacccgccccatggggaacctatctccactgctatggccagctatttttttcgagccaggctctcgctctgttgcccaggctggagtgcagtggtgcaatcactgcactgatcctcccacctcagcctacaagtagctgggactacaggcgtgcaccaccacgcctagctaatttctaaaatttttttgtagagacggtctctacaatcgcttgagcccaggctggtcttaaactcctggacccaagcgatcctcctgtctcggcctcccaaagtgttgggattatgggtgtgagccaccgtgttgggcctttgcccagctattttgatgcccagacctgcttcacctttgtgtatgatgccagggggcttcctgagcttggtgtatttttgttgtgtgtttgttttttaagttgggagtttttggggaaaaaaatttttctcctgacattcaatgccagacaacttatatgcatccactagctaccccggattgtaaatcctaggttattcttgggaaaagttgctttaaaaaaataaataaatgtttgggtataaaaaaaaaaaaaaaaaaaaa

SEQ ID NO: 58456 - DNA, 1746 bp, Homo Sapiens
aaaggcagggggtggggctgcttcatattgaggctcgagtcataaggggctctggagggtctgtgggcacagccccacacccttgtcctggggcctctttcctcttccctctaggctggtctcccttcgtcagtgcccaccacccttaacagtttgcatttctgttgtttcttccagtctccatctgctgctgcctcttcatcctcttcctcttcctctcggagctcaccggatttataacgacagaagttgtgaacgagctctatgtcgatgacccagacaaggacagcggtggcaagatcgacgtcagtctgaacatcagtttacccaatctgcactgcgagttggttgggcttgacattcaggatgagatgggcaggcacgaagtggccacatcgacaactccatgaagatcccgctgaacaatggggcaggctgccgcttcgaggggcagttcagcatcaacaaggtccccggcaacttccacgtgtccacacacagtgccacagcccagccacagaacccagacatgacgcatgtatccacaagctctcctttggggacacgctacaggtccagaacatccacggagctttcaatgctctcgggggagcagacagactcacctccaaccccctggcctcccacgactacatcctgaagattgtgcccacggtttatgaggacaagagtggcaagcagcggtactcctaccagtacacggtggccaacaaggaatacgtcgcctacagccacacgggccgcatcatccctgcaatctggttccgctacgacctcagccccatcacggtcaagtacacagagagacggcagccgctgtacagattcatcaccacgatctgtgccatcattggcgggaccttcaccgtcgccggcatcctggactcatgcatcttcacagcctctgaggcctggaagaagatccagctgggcaagatgcattgacgccacacccagcctaatggccgaggaccctgggcatcgccagccttgcctccagtgccctgtctcctttggccctcaatctggtcccaaatctggctgtgtcccaaagggtgtgtgggaagtggggggaaagtagaggatggctcgatgttttgcagctacctcttttccccgtgtttctttttagacaaattacactgcctgaagttgcagttcccctttccctggggagccccaagaacagagtcaggcaaggggtggggagtccaggggaacatcccagaatgcatatcgatcagctctcagccaggcttcgacaatctcgcagcccccactaggtggacacattaatgatttggtttctcccctgggcagccaacctgccccagaggcaccagacctgggctttcagctttgggaccaggctgcccaaaggtactcctttatacacccggcaccttccacgaaagatggtacttcccaagcaagcccctatgatttgtcactatagatggaaatgtgtggcatgcacatgagttgaaattcttttatgcatttttttgaagaaaaaaaaaaaaaaacaactctgaggacataggggatgtcagtttcctatggaagagacacctctgacccgttattcttataatcaaaatctgaagggaaaaaaatgttttagttctttccccactcgttgggttcaactagattaaaaggctgattttcagaaaaaaaaaaaaaaaaaaaaaaaaaacacaacaacaaaacaaaaaaaaaaaa

SEQ ID NO: 58457 - DNA, 1876 bp, Homo Sapiens
ccagcttttattttggtggcagcatctattaaggaggagactcattttgtgggcaggatgaaaaattaaacattgcaaatccatcaggtacttgctggattagagttagttgactgacttgttggctacagggaacaaggtagttctgaaaccaaggaacaagctgccaaggaacagtccagccctgcccaaaagatgatggtcttctccatccaggcagcacaaatcaactcgaggttccaagagggccagtagacgccagcctaccttactgtaaagtgtctcacatgcatatctaactgttctctcctttcctttacatttaaatcctgttgtattggcttctctgttttccctttcctggaagcgctgtagcgtaattaaaagagtatgagttttggaatttcaaaacttggtttatagtccagcctctgccaaatactgtgacatgttacctgcttgagccatcattttctgatatgtagattgggactaacaattcttccttaatcagctcaagtttcacaaaatatgggtaaacatcacgtgactcaaaatcaactgaggcaaaaattcagatgtcaatggccctttcttgaattattagaacctccatgagctagaaattcttggaatctgaattttaaactcactcccaagtgatttccatacacacagaagtttgagaaccacatcccaccttgtcttgtgtcaggattaaataaaaccatataggtgaaacttatctgtaaattgcatatcaagacatgcttagctgctctcaatagtatcattttccagatagcccaaagcaccaaagtaaggacagcgggccattttcccaagatctttcttccagcttttccctgccatgccaacagcattcttcatcttcaggtaggcagggcaggttcactgggggttggggtagagctcagcactgtgacacaggcagtacttccgtagaatttcatttatgtgactgtacctaccccacagggtgatataaggattaattcctatttggtaatttactgtgtgtaaaatgccttgagccccttggaggaaagtgctatataaatgtaaaataattattataataataataacctcgactatttaactgatcagtgaattagccagaagatttaggctgccaagggacaaggctgaaaccattataagtagaaacactttacatcatcatatctcaaactgttatcatgaaaaagggaaacaaagggtgaaaattaagataaatccatgttctcaactgatttaaatgacagaggatcactagtaatgattcatgaaagccaggaaatgcaaaaatgacagctgcattgtaattctaactcagccacatgtcctgaggttttgtacactttggtcttttatttgtagggaaaatatctcatcagtgcaacatctaaaatttagcattatgaaggcacttgactatgcttttgcttagttgaaatacgttcataatgtatcccctatttgtaggtaatgatttttctacctaaaaagcattgacattattctatgaagttccaggtaaattttgaatcggttgcttacaatctgcctccccacatacacaccctaagaatacactctaacaaaacaatggtgtatttctagatctaaatttaggaaaccaaaatatatagaagataccttttcttcccaggaagaaaatgctttggtatataaactcacatgagctcaaccgtcttcagctcttacattatttgttttatttatttattagattcatgaagattcttctaccaaaagctcaaggggctgaacccagaactttcatatattgaatgtgaatcacttcttaaaccacagaaaaaaaaaaaaa

SEQ ID NO: 58458 - DNA, 1047 bp, Homo Sapiens
gctgggcagcctggttcggggcaggttgtgaggccacagcaatgctgtcccaagtgtgtggaacctcacactccctctggactccgggccccaccaaagtcctgccagcacaacgggaccatgtaccaacacggagagatcttcagtgcccatgagctgttcccctcccgcctgcccaaccagtgtgtcctctgcagctgcacagagggccagatctactgcggcctcacaacctgccccgaaccaggctgcccagcacccctcccgctgccagactcctgctgccaggcctgcaaagctggctccagctggggcctgctatgctcagtcagtgactttcatccttcctgccatttgcagagacatcctcaggatccatgttccagtgatgctgggagaaagagaggcccgggcaccccagcccccactggcctcagcgcccctctgagcttcatccctcgccacttcagacccaagggagcaggcagcacaactgtcaagatcgtcctgaaggagaaacataagaaagcctgtgtgcatggcgggaagacgtactcccacggggaggtgtggcacccggccttccgtgccttcggccccttgccctgcatcctatgcacctgtgaggatggccgccaggactgccagcgtgtgacctgtcccaccgagtacccctgccgtcaccccgagaaagtggctgggaagtgctgcaagatttgcccagaggacaaagcagaccctggccacagtgagatcagttctaccaggtgtcccaaggcaccgggccgggtcctcgtccacacatcggtatccccaagcccagacaacctgcgtcgctttgccctggaacacgaggcctcggacttggtggagatctacctctggaagctggtaaaaggaatcttcctagcccagaccctggagctgaaggtcacggccagtccagacaaagtgaccaagacataacaaagacctaacagttgcagatatgagctgtataattgttgttattatatattaataaataagaagttgcattaccctcaa

SEQ ID NO: 58459 - DNA, 704 bp, Homo Sapiens
  misc_feature (632)..(632): n is a, c, g, or t
gccaaattgatgtattatatattgtggtttctgtttcttgaaagaatttttttcgttatttttacatctaacaaagtaaaaaaattaaaaagagggtaagaaacgattccggtgggatgattttaacatgcaaaatgtccctgggggtttcttctttgcttgctttcttcctccttaccctaccccccccctcccacacacacacacacacacacacacacacactttctataaaacttgaaaatagcaaaaaccctcaactgttgtaaatcatgcaattaaagttgattacttataaatatgaactttggatcactgtatagactgttaaatttgatttcttattacctattgttaaataaactgtgtgagacagacaccaaaaaaaaaaaaaaaaaactcgagggggggcccggtacccaattcgccctatagtgagtcgtattacaattcactggccgtcgttttacaacgtcgtgactgggaaaaccctggcgttacccaacttaatcgccttgagcacatgcccctttctccagctggcgtaatagcgaagaggcccggaccgatcggcctttccaaagttgcgcagcctgattggcgaatggcaaatttcagcgttaatattttgntaaaattccgttaaattttgttaaatcactcaatgtttacccaatagccaaaatggcaaatcccttttaatt

SEQ ID NO: 58460 - DNA, 1274 bp, Homo Sapiens
cagacatatagaacagcgcattcttctgtagacatttgctcatgttggtaaatacaatcacccatatgaaaaaattgttttcacctgatatgaaaatgttagaaaaggcaaactccgggacttctaaagatttacttaaatcccattatgtactttattcagaatgtagaagctgacttgaaaggcatccttggtactaagtgaagcttattcagaaaatgcatttttcaaatgcaatggcaactgcttgtagatatcatttttgcagtgtatgttggagctgtaatggttgcaattatgtttcttatttccttaaaagcaaaaagcgtagtttctgatttatgttatagaatgatactgattagactttgagccaaggggaaaatactaaattcttttaaacctggagccttagagagccacaggaatatcttctgttgtacagtctaataagctgtggtaggaagtatcatgtaatcacagtttaatgacagtttatgtatatatataattcagtattccctctgataacatagttgccagtgtttaatacacttgtaacttggatttttaccttataggctatatgtatactcagttttttaaagcatttttttcagagatcacttaattccccatgcttctgcaatgcatataaaaactataaatgccgagtggtagaaactcctctttctacgtttggttttgtgggagctgcgcttgaaaccattttgattttctatcttatggtgtcctctgttgttggtttctatagccttcgattttttggaaactttactcccaagaaagatgacacaactatgacaaagatcattggaaattgtgtgtccatcttggttttgagctctgctctgcctgtgatgtcgagaacactggggcttcataaacttcacttaccaaatacttcaagggattcagaaacagcctcagtgatgacctcgtctgccagggacacaggttttcatcatttacaggctcttatgtgctagttttgttggtagcacgttatttaatgcataaaggcagaattcttacaagtttttttttttaatgtgaacatagatgcagcaccgactttttaaacttgaaaaaactggtataatgttaacttttaaaaataacatttggacacactagtaattgatttttgtttacagattgttttgtttacaaattgttagtctttgtttctatgagatacttttagtgtgactttttaaatgtcttagaaattaaaagttgtacaaaaagtg

SEQ ID NO: 58461 - DNA, 1149 bp, Homo Sapiens; identical to SEQ ID NO: 23108

SEQ ID NO: 58462 - DNA, 3374 bp, Homo Sapiens
gacgagcgggagaggcggcggcggcggccagcacggaggcggaggccgggggttagaatggaacaaactgaaggcccgatgagaaagggaaagttaaggatgctggagcagaacaatggatttctctttctctttcatgcaagggatcatgggaaacacaattcagcaaccacctcaactcattgactccggccaacatccgtcaggaggatgcctttgataacaacagtgacattgctgaagatggtggccagacaccatatgaagctactttcgcagcaaggctttcagtacccagctacaacagaagatcttcctccactcacaaatgggtatccatcatcaatcagtgtgtatgaaactcaaaccaaataccagtcatataatcagtatcctaatgggtcagccaatggctttggtgcagttagaaactttagccccactgactattatcattcagaaattccaaacacaagaccacatgaaattctggaaaaaccttcccctccacagccaccacctcctccttcggtaccacaaactgtgattccaaagaagactggctcacctgaaattaaactaaaaataaccaaaactatccagaatggcagggaattgtttgagtcttccctttgtggagaccttttaaatgaagtacaggcaagtgagcacacgaaatcaaagcatgaaagcagaaaagaaaagaggaaaaaaagcaacaagcatgactcatcaagatctgaagagcgcaagtcacacaaaatccccaaattagaaccagaggaacaaaatagaccaaatgagagggttgacactgtatcagaaaaaccaagggaagaaccagtactaaaagagggaagccccagttccagccaatactatcttctgttccaacaacggaagtgtccactggtgttaagtttcaggttggcgatcttgtgtggtccaaggtgggaaccatatccttggtggccttgtatggtttcaagtgatccccagcttgaggttcatactaaaattaacacaagaggtgcccgagaatatcatgtccagttttttagcaaccagccagagagggcgtgggttcatgaaaaacgggtacgagagtataaaggtcataaacagtatgaagaattactggctgaggcaaccaaacaagccagcaatcactctgagaaacaaaagattcggaaaccccgacctcagagagaacgtgctcagtgggatattggcattgcccatgcagagaaagcattgaaaatgactcgagaagaaagaatagaacagtatacttttatttacattgataaacagcctgaagaggctttatcccaagcaaaaaagagtgttgcctccaaaaccgaagttaaaaaaacccgacgaccaagatctgtgctgaatactcagccagaacagaccaatgcaggggaggtggcctcctcactctcaagtactgaaattcggagacatagccagaggcggcacacaagtgcggaagaggaagagccaccgcctgttaaaatagcctggaaaactgcggcagcaaggaaatccttaccagcttccattacgatgcacaaagggagcctggatttgcagaagtgtaacatgtctccagttgtgaaaattgaacaagtgtttgctcttcagaatgctacaggggatgggaaatttatcgatcaatttgtttattcaacaaagggaattggtaacaaaacagaaataagtgtcagggggcaagacaggcttataatttctacaccaaaccagagaaatgaaaagccaacgcagagtgtatcatctcctgaagcaacatctggttctacaggctcagtagaaaagaagcaacagagaagatcaattagaactcgttctgaatcagagaaatccacttgaggttgtgccaaagaagaagatcaaaaaaggagcaggttgaaacagttcctcaggctacagtgaaagactggattaccagaaagggtcggcggaccgggggagtgcagggctctgtcagattcagtgaccagctccgtctccgcagcgattgaggaaactgtggactgagattcctgtacaatttcatcccagaaactccagacttgtagtctccatgcaagatttctttgtcggcggcttgataaacagtttctttgttttcgattttgatttcgccaatcatcattattggcattttcctgcctggtttcttcttcaagactctgaacaattgctttaacagtcaaatgatttttttttttcggtttgagctggatgggtacagcttaaatcatgggtccagcctaaaaaccaccatttaacttacactgatcaatttcaacatggactgtttttggttttttgtttttaaataaagcatcattaatgcacatctgcaggggtttgccaaacagcccaaactgtatacattacaatcattaaaagttcttattttttttaatattagtgccgttatcatggagaacagcatgacagctgtctttggcagtctgtcatttttctagcattttcagaaactcatcggaaatggcggtacctgtgtttcccttcgaaagcctctcagtacagcactcctgttcctctgttaaaactccttgttaatccagtgatcttttaggccaaggaaatattttgtgatggtgttctgggtccatacaccagcaatgaaggagatagatttgtgtacttgtgttttttaatcagcattaacatgggcaggcaccctcatttatagatgtcaggaaacattcagtgaaaaacttgtagaatgggatgtgataacgaggttccagtaatctgagcagtctaacgaggcccacctcctccaccacagaacgtggctatgttccaagtgctactctcactcagcctgttgcggatcttcatggcctcaggagacttgtttctccatgggctcttctggactgcacacttccaccatagcttgctgggttgatctagatgtctgtttgttgtatggaaattttgggggaaaaaatccaaaacacaaactgtgggttgaaatattaaccgtctccttggttccttggtattcaccgtgcctgatctgcacatttcatcgtggctgtttctgtatagcctatactgcattagcccaagagattgttgctttgtaactttttgcactattgttttggctggatttgtattacacacagttttaaaaaaaacaattccacacttaaaaaaaaaaaaaaacatgtcggcgccttggccagcgactttactgagcaaggttttgcatgccggcccgaaattgggctcactttggcaatcccctaaaggggtggttacaattatggccgcggtttacaaacgccggatggaaaacctgt

SEQ ID NO: 58463 - DNA, 443 bp, Homo Sapiens
atttttaaaggtagacattttaatttgtttctatggtcagtgttagatttttaaaaatgctttttaaaagtatgggttcataaagttcaactttccatactataacatcaatagccatgattttaacaggtttccttatcactattaaaatgggagatttaaactattttaaaagttactaaagacagcacccaacttttcaaagatttaggttgaatgcttgggtgaggatttctcatacaaatatatggtaaatagatcctaagtaacatactatagaaccaagcaaaacatgtttctaagggaaacataaaactttcattttgggatgtcaacaaatcaaatattgaaatcagctttttttttttttttttttgtcctacctcttgggccacagatgacttcagtggcttgggtgtagaaactacagaaaactggtaacc

SEQ ID NO: 58464 - DNA, 2080 bp, Homo Sapiens
aaattttttaaataaatagactggtagagaacactgatcagtatcccctaataaatccactttatcctcggatggtttctatcatgtaaacataggattaaactcttagcacaaataaaatggaatgttttcgtctctacattcagctcttctcacagacagttttatcatcttatcatttttggcacaaaacaaactatgttttattcagtttaccaagaagatggagtcttctgatgtaaacaaaagactggaaaaactctcagccttggattataagattttctattatgaaatacccggcccaataaacaagacaacagagcgacatctagctatcaactgtgttcatgatagagttgtttgctggtggccactggtcaacgatgatgcttggccttgggcccccatttcttctgagaaggacagagccaatctactcctcctgggttatgctcaaggaagactagaggttctgagttctgtccgcacagaatgggacccactggatgttcgctttggcaccaaacagccttatcaggtgttcacagtggagcactccgtaagtgtagacaaagagcccatggctgacagctgcatctatgaatgcattcggaataaaatccagtgtgtgtcagtcaccagaataccactaaagtcaaaggccatcagctgctgcaggaatgttactgaagacaaactgattctgggctgtgaagattcttcgctaattctttatgaaactcaccgtagagtgactctcttagcacagactgaacttttgccttcattaataagctgccacccaagtggtgccattctgctagttggcagcaaccaaggggagttgcaaatttttgatatggctctatcccctattaacatccaactgttggctgaagaccgcttacccagggagactctgcaattcagtaaattatttgatgcctccagcagtcttgttcaaatgcaatggatagctcctcaggttgtttctcagaagggtgaaggtagtgatatctatgatctcctcttcctcaggtttgaaagaggacctttgggtgtgctgttgtttaaactaggcgtcttcactcgaggacagctgggcctgatagacatcatcttccagtacattcactgtgatgagatctatgaggcaataaacatcctgagcagcatgaactgggacactctgggccaccagtgctttatcagcatgagcgccattgtaaaccatcttcttagacagaagctcactccagagagagaagcacagcttgagacaagccttggaaccttctatgctccaacaagaccacttctggattccactatattggaatatagagatcaaatcagcaaatatgcaaggagattcttccatcacttgctcaggtaccagaggtttgaaaaggcatttctcctagctgttgacgttggtgctcgtgacctctttatggatattcattaccttgcactagataaaggtgaattggcactagctgaagtggcaagaaaaagagctagtgacattgatgcagaatcaataacctctggggttgaactcctgggacccttggacagaggggatatgctaaatgaagcatttattggcctgtctttagcacctcaaggagaagactcatttccagataacctccctccctcttgcccaacccacagacatattttacaacaaagaatactgaatggctcttctaacagacaaataattgacagaaggaatgaacttgaaaaagacatctgttctggatttttgatgactaatacctgtaatgcagaagacggagaactgagagaagacggcagagaacaggaaatcagagatggtggttctctcaaaatgattcactttggtctggtgtaaacattaagaaaaaaagaaaactgccttcttcatatctaaacttttcatggcctgatacagacttaaaatcccccgtgtggatttttaacaagagacagtatgaatcatataaattagttaagagttttgagttgagtgtttgttttcaaaataaagttttattatttcaaaaacaaaaaaaaaaaaaaaaaa

SEQ ID NO: 58465 - DNA, 1056 bp, Homo Sapiens
ccgcttttttttttttttctctaaacttctcttctcgcttcatttcattcatttgatcttcaatcactgataccctttcttccagttgattgaatcagctactaaagcttgtgcattcgtcacgtagttctcatgccatggttttcagctccatcaggtcatttaaggacttctctacactggttactctagttagccatttgtctaatcttttctcaaggtttttagcttctttgcgatgggttcgaacttcctcctttagctcggagaagtctgattctctgaagccttcttctctcaactcatcaaagtcattctgtgtccagctttgttccgttgctggtgaggagctgcggtcctttggagggggagaagcgctctgatttttataattttcagcttttctgctctgttttttccccatctttgtggttttatctacctttggtcctcgatgatggtgacatacagatggggttttggtgtggatgtcctttctgtttgttagttttccttctaacagtcaggaccctcagctgcaagtctgttggagtttgctggaggtcaactccagaccctgtttgcctgggttatcagcagcggaggctgcaggacagcgaatactgctgaactgtctgggttttatatgaactccatcccttaccatgctacgttgggtatgttactgtgcctcagttttctcatctatgaaatgtctaaattagtgcctacttcgtaaggtggctgagataattaaataggttactataatttttacagacagggtctcactttgtcaccaaggctgttggtaacctgagaaaatgctccacctcatcactcctggaagcctgcactttccgtagaccttaaaatctcagaggtagggctgccaccaaggtgaagatgggaacgcagatgatccatgagtttgccctggtttcactggcccaagtggtttgtgctaaccacgtctgtcttcacagctctgtgttgccatgtgtgctgaacaaaaaataaaaattattattgattttaaaaaaaaaaaaaaaaaaa

SEQ ID NO: 58466 - DNA, 505 bp, Homo Sapiens
gcagcatggacgacctgatacgccactgtaacgggaagctgggcagctacaaaatcaatggccggacgaaagccatggttgcttgttatccgggcaatggaacgggttatgtacgtcatgttgataatccaaatggagatggaagatgtgtgacatgtatatattatcttaataaagactgggatgccaaatttgatagactgctgtttttctggtctgaccgtcgcaaccctcatgaagtacaaccagcatatgctacaaggtacgcaataactgtttggtattttgatgcagatgagagagcacgagctaaagtaaaatatctaacaggtgaaaaaggtgtgagggttgaactcaataaaccttcagattcggtcggtaaagacgtcttctagagcctttgatccagcaataccccacttcacctacaatattgttaactatttgttaacttgtgaatacgaataaatgggataaaggcccaaaaaaaaaaaaaaaaaaaaaa

SEQ ID NO: 58467 - DNA, 4868 bp, Homo Sapiens
aaaatactcccttgcctcaaaaactgctcggtcaaacggtgatagcaaaccacgcattcacagggccactgctgctcacaaaaccagtgaggatgatgccaggatgatgtctgcctcgcgcctggctgggactctgatcccagccatggccttcctctcctgcgtgagaccagaaagctgggagccctgcgtggaggtggttcctaatattacttatcaatgcatggagctgaatttctacaaaatccccgacaacctccccttctcaaccaagaacctggacctgagctttaatcccctgaggcatttaggcagctatagcttcttcagtttcccagaactgcaggtgctggatttatccaggtgtgaaatccagacaattgaagatggggcatatcagagcctaagccacctctctaccttaatattgacaggaaaccccatccagagtttagccctgggagccttttctggactatcaagtttacagaagctggtggctgtggagacaaatctagcatctctagagaacttccccattggacatctcaaaactttgaaagaacttaatgtggctcacaatcttatccaatctttcaaattacctgagtatttttctaatctgaccaatctagagcacttggacctttccagcaacaagattcaaagtatttattgcacagacttgcgggttctacatcaaatgcccctactcaatctctctttagacctgtccctgaatcctatgaactttatccaaccaggtgcatttaaagaaattaggcttcataagctgactttaagaaataattttgatagtttaaatgtaatgaaaacttgtattcaaggtctggctggtttagaagtccatcgtttggttctgggagaatttagaaatgaaggaaacttggaaaagtttgacaaatctgctctagagggcctgtgcaatttgaccattgaagaattccgattagcatacttagactactacctcgatgatattattgacttatttaattgtttgacaaatgtttcttcattttccctggtgagtgtgactattgaaagggtaaaagacttttcttataatttcggatggcaacatttagaattagttaactgtaaatttggacagtttcccacattgaaactcaaatctctcaaaaggcttactttcacttccaacaaaggtgggaatgctttttcagaagttgatctaccaagccttgagtttctagatctcagtagaaatggcttgagtttcaaaggttgctgttctcaaagtgattttgggacaaccagcctaaagtatttagatctgagcttcaatggtgttattaccatgagttcaaacttcttgggcttagaacaactagaacatctggatttccagcattccaatttgaaacaaatgagtgagttttcagtattcctatcactcagaaacctcatttaccttgacatttctcatactcacaccagagttgctttcaatggcatcttcaatggcttgtccagtctcgaagtcttgaaaatggctggcaattctttccaggaaaacttccttccagatatcttcacagagctgagaaacttgaccttcctggacctctctcagtgtcaactggagcagttgtctccaacagcatttaactcactctccagtcttcaggtactaaatatgagccacaacaacttcttttcattggatacgtttccttataagtgtctgaactccctccaggttcttgattacagtctcaatcacataatgacttccaaaaaacaggaactacagcattttccaagtagtctagctttcttaaatcttactcagaatgactttgcttgtacttgtgaacaccagagtttcctgcaatggatcaaggaccagaggcagctcttggtggaagttgaacgaatggaatgtgcaacaccttcagataagcagggcatgcctgtgctgagtttgaatatcacctgtcagatgaataagaccatcattggtgtgtcggtcctcagtgtgcttgtagtatctgttgtagcagttctggtctataagttctattttcacctgatgcttcttgctggctgcataaagtatggtagaggtgaaaacatctatgatgcctttgttatctactcaagccaggatgaggactgggtaaggaatgagctagtaaagaatttagaagaaggggtgcctccatttcagctctgccttcactacagagactttattcccggtgtggccattgctgccaacatcatccatgaaggtttccataaaagccgaaaggtgattgttgtggtgtcccagcacttcatccagagccgctggtgtatctttgaatatgagattgctcagacctggcagtttctgagcagtcgtgctggtatcatcttcattgtcctgcagaaggtggagaagaccctgctcaggcagcaggtggagctgtaccgccttctcagcaggaacacttacctggagtgggaggacagtgtcctggggcggcacatcttctggagacgactcagaaaagccctgctggatggtaaatcatggaatccagaaggaacagtgggtacaggatgcaattggcaggaagcaacatctatctgaagaggaaaaataaaaacctcctgaggcatttcttgcccagctgggtccaacacttgttcagttaataagtattaaatgctgccacatgtcaggccttatgctaagggtgagtaattccatggtgcactagatatgcagggctgctaatctcaaggagcttccagtgcagagggaataaatgctagactaaaatacagagtcttccaggtgggcatttcaaccaactcagtcaaggaacccatgacaaagaaagtcatttcaactcttacctcatcaagttgaataaagacagagaaaacagaaagagacattgttcttttcctgagtcttttgaatggaaattgtattatgttatagccatcataaaaccattttggtagttttgactgaactgggtgttcactttttcctttttgattgaatacaatttaaattctacttgatgactgcagtcgtcaaggggctcctgatgcaagatgccccttccattttaagtctgtctccttacagatgttaaagtctagtggctaattcctaaggaaacctgattaacacatgctcacaaccatcctggtcattctcgagcatgttctattttttaactaatcacccctgatatatttttatttttatatatccagttttcatttttttacgtcttgcctataagctaatatcataaataaggttgtttaagacgtgcttcaaatatccatattaaccactatttttcaaggaagtatggaaaagtacactctgtcactttgtcactcgatgtcattccaaagttattgcctactaagtaatgactgtcatgaaagcagcattgaaataatttgtttaaagggggcactcttttaaacgggaagaaaatttccgcttcctggtcttatcatggacaatttgggctagaggcaggaaggaagtgggatgacctcaggaggtcaccttttcttgattccagaaacatatgggctgataaacccggggtgacctcatgaaatgagttgcagcagaagtttatttttttcagaacaagtgatgtttgatggacctctgaatctctttagggagacacagatggctgggatccctcccctgtacccttctcactgccaggagaactacgtgtgaaggtattcaaggcagggagtatacattgctgtttcctgttgggcaatgctccttgaccacattttgggaagagtggatgttatcattgagaaaacaatgtgtctggaattaatggggttcttataaagaaggttcccagaaaagaatgttcattccagcttcttcaggaaacaggaacattcaaggaaaaggacaatcaggatgtcatcagggaaatgaaaataaaaaccacaatgagatatcaccttataccaggtagatggctactataaaaaaatgaagtgtcatcaaggatatagagaaattggaacccttcttcactgctggagggaatggaaaatggtgtagccgttatgaaaaacagtacggaggtttctcaaaaattaaaaatagaactgctatatgatccagcaatctcacttctgtatatatacccaaaataattgaaatcagaatttcaagaaaatatttacactcccatgttcattgtggcactcttcacaatcactgtttccaaagttatggaaacaacccaaatttccattggaaaataaatggacaaaggaaatgtgcatataacgtacaatggggatattattcagcctaaaaaaaggggggatcctgttatttatgacaacatgaataaacccggaggccattatgctatgtaaaatgagcaagtaacagaaagacaaatactgcctgatttcatttatatgaggttctaaaatagtcaaactcatagaagcagagaatagaacagtggttcctagggaaaaggaggaagggagaaatgaggaaatagggagttgtctaattggtataaaattatagtatgcaagatgaattagctctaaagatcagctgtatagcagagttcgtataatgaacaatactgtattatgcacttaacattttgttaagagggtacctctcatgttaagtgttcttaccatatacatatacacaaggaagcttttggaggtgatggatatatttattaccttgattgtggtgatggtttgacaggtatgtgactatgtctaaactcatcaaattgtatacattaaatatatgcagttttataatatcaaaaaaaaaaaaaaaaaaa

SEQ ID NO: 58468 - DNA, 2147 bp, Homo Sapiens
gtaagacatgacttgttcctctttgctttccaccatgattgtgaggcctcctcagccacagagaactgtgagttcattaaacctctttcctttataaattacgcagtttcgtgtatgtctttattagcagcacgagaacaaactaatacagtaaattggtaccggtagagttgggctgtaaagatacccaaaaatgtggaagtgactttggaactgggtaacaggcagaggttggaacagtttggagggctcagaagaagacaggaaaatgggggaaagtttggaacttcctagagacttgttgaatggctttgaccaaaatgctgataatgatgtggtcaatgaaatccaggctgaggtggtctcagatggagatgaggaacttgttgggaactgaagtaaaggtgattcttgctatgttttagcaaagagactggcagaattttgcccctgccctagagatttgtgaaactttgaacttgagggagatgattttgggtacctggcagaagaaatttctaagcaacaaagcatcaagaggtgacttgggtgctgttaagaccattcagttttaaaaggaaaacagagcataaaaattcagaaaatttgcagcctgacaatgagacaggaaagaaaaccccattctctgaggaaaaattcaagccagcggcagaaatttgcataagtaacaaggagccaagtgttaatcaccaaaacaatggggaaaatgtctccagggcatgtcagaggtcttcatggcaggccctcccatcacaggcctggaggcctaggaggaaaaaatggtttcgtgggctggccccagggcccccctcctctatgtagcttagggacttggtgccctgtgtctaagctgctccacccatggctaaagggggccaaggtatgtacagctcaggctgttgcttcagagggttcaagccccaagctttggcagcttccatgtgctgttgagcctgcagatgcacggaaaacaagaattgaggtttgggaacctccgcctagattacagaggatgtatggaaacgcctggatgcccaggcagaagtttgctgcaggggtggggctcttatggagaacctctgctagggcagtgcagaagggaaatgtgggtttgcagcccccatacagagtccctactaaatgctagtccatggaagcatccaggagggaggctgtaccctgcaaagccacaggtggggagctgcccaaggccatgggagcctacccctggcatcagcatcacctgggtgtgagacatggagtcaaaggagatcattttggagctttcagatttgactgccctgctggattctagacttgcatggggcctttagcccctttgttttggccaatttctcccatttggaatgggtgtatttatccaatgcctgtactctcattgtatccaggaagtaactcacttgtttttgattttacaggctcataggcggaagggacttgccttgtttcagatgagactttggactgtggacttttgagttaatgctgaaatgagttaagactgtgggggactgtcaggaaggcatgattggttttgagatgtgaggacatgaaatttgggaggggccatgggtagaatgatatggtttagctgtgtccccatgcaaatttcatcttgaactgtagctcccacaattcccctgtgtcatgggagggacccagtgggaggtaattgaatcgtgggggcgggtccttcccatgctggtcttgtgataatgaataagtctcacgagatctgatggttttataaagaggagttcctctgcacaagttctctctctttgccttctgccatccatataagatgtgacttgctcctccttgccttctgccatccatataagatgtgacttgctcctccttgccttctgccatccatataagacgtgacttgctcctccgtgccttctgccatgattgtgaggcctccccagccatgtggaactgtgaatccattaaacctctttcctttataaattacccactctcggatatatctttattagcagtgtgacagcagactaatagagggattaaagataaaaattttggctggatgcaatggctcacgcctgctatcccgctataaaaaaaaaaaaaaaaaa

SEQ ID NO: 58469 - DNA, 1404 bp, Homo Sapiens
aattcgacacgaggggggagcgtgcgtaggggatggtgccagcgctgcgttatttggttggtgcctgcggacgggcccgcgggcgtttcgccggtggctcccctggggcgtgcgggttcgcgtctgggaggccaagaccgctgtgtggaggtagccgcagcgccagcaccagctcatttgatatagtcattgttggtggcggaattgtggggcttgcctctgccagagcactcatcctgcgacatccatcactttctattggtgttctggaaaaggagaaagatttagctgttcaccagactggacataacagtggtgtcatacatagtggaatttattataaacctgagtctctgaaagccaaattatgtgtacaaggtgcagccctcctctatgagtactgtcagcaaaagggaatttcctacaagcagtgtggcaagcttatagtagctgttgaacaagaagaaattcccagacttcaggccctatatgagaaaggcctccagaatggtgtcccgggcctgaggctgatccagcaggaggatataaaaaagaaggagccatattgtaggggtctaatggctattgattgtccacatactggcattgtggactatcggcaggtggctttgtcatttgcccaggatttccaagaagcaggtggctctgtcttgaccaattttgaagtaaaaggtattgaaatggctaaagaaagtccttcaagaagtatagatggaatgcaatatccaattgttataaagaatacaaagggagaggaaattcgatgtcagtatgttgtgacatgtgcaggactttactcagaccgtatttcagagttgagtggctgcactcctgatcctcgaattgtaccattccggggagattacctgcttttgaagccagaaaaatgttatcttgtaaaaggaaatatttatccggtcccagatagccggtttcctttcctaggagttcacttcacaccaaggatggatggcagtatttggctagggcctaatgcagttcttgcctttaaacgagagggttacagaccctttgacttcagtgccacagatgttatggatataattatcaatagtggcttgattaaactggcatcccagaatttttcctatggagttactgaaatgtataaagcatgttttcttggtgcaacagtgaagtatcttcaaaaattcatccctgaaattactatcagtgatatacttaggcaggtggctgtgagaggaccgagctggctatggcagcaacccatgaaagtgagtgataacaacatttattgtttcctgtggcgttgctttgctttgctattgactggtagcacttgtagctttaaataaattgaggaagtatgagagagtaaatggaaaaaaaaaaaaaaaaaaa

SEQ ID NO: 58470 - DNA, 464 bp, Homo Sapiens
ttttttttttttttttttttttttttaaattttgcatacatacaatttatttatttatattatagccctgtatgatacaagcattttctcatctaaaagtgttattttaactcagaaaacatacttgcattaagctcttgagcctcagaatggagcacagagggaacaaaacccttttgaaattaaaaatattattcagcagaaactgatacttttgaaccaatatgaatttgaaataactaaatattttttcaaaatctcccttaacatcaaagttcaagatgattgcatttattttgatgtcactatataaatacaaggatgttaactgatactcacctaagtcaaatattccagttgcattaacaaacatacacataacaaatataaatttatatcaaatgtcaaatttccccattatcttctcctcttcttcattaggaatttgatgttctgaaaagtgc

SEQ ID NO: 58471 - DNA, 369 bp, Homo Sapiens
tttttttttttttttttgatctttataaccctttaatacatttttcttccaaactggggttagctggaaaaatttaagaaattcaacaatgagcatctgtccttcctctataccactactagagaaagggattaattacctcctagttttcatttgaaaacaacaaaacacaagatcaatcaaatatcatttcccagttgattaaaacttatacattttatacatttcataaacaacgtttcaccacaccaaaatattgttgaattatagttaaaactggatttataaaccgagtaaactcaatagtactggttagtcctttataaatttggggatagaaaaaaaggaacattaacagctttagataag

SEQ ID NO: 58472 - DNA, 1414 bp, Homo Sapiens
agtgatccacccatctcagcctcctgggtggctgggattgcaggtgtgcaccactaccacttggctgatttttgtacttttagtggagatggggtttcgccatgttggccgggctggccttgaactcctgacctcggatgatccgcccgcctcggcctcccaaggtgctggggttacaggcgtgagccaccgcacccggcccccttccttcgtcttagtcaatcctatcccacctcttcttccaccagtcccctcacctgatggtcccaacacttcatcatccaccacctcctggagggggtaccccgaggtgctccgctggggactctgctcattctggcggtgcggttgacggctggtcgtgatctttcccgtaatctgtcccctcttacggaacctagtctccgttctgtccatggccttcttctggacactgctaggatccagaagagtatgttatcaattctcaagcctaggagaagtcaggagtggagaacagctctgagaagatactgttgtccaactgatctccaggcaccacggagtccggtccctccaatcaggaaggtcggaatctctgatgtcatcgttcatgccaacctggcaaccagtttgaaaaaaaaacacatgtaactgccaggctgatctcttgtcctggagatcctgggtgaatggtatctcctgccactgtcccaacctcagaccattgtccaaaagcatcttcagggactccacatccctctgttccctgtcccagcagaggctgtgtcctctccactcaaagcctgaagcatgttggggtctcttcgtctctgtacgtgcccatttcagagtccagtctggtgggagagggaacagagtgggaaagaaaactagggtaagcagaaacgatgaaaccttataagagtgagattatcatgtacaagagtgagattatcatgtacaagagtgagattatcatgtacaagagtgagattatcatgtacaagagatcccaggaatactgacttgatgaaaaagtcacatcagagcactcagtttggcagagcttttctgctgaatgtttactcacattcactgtccaagattctgtactgggggtacatacgtcctctgccctaaggcaattttgagtccaagagacattttgaggcctaaaaatcataggaaactgcccctgagctcacacatatttccaatggagctcacacatatttccaatggtgtccccaatttcagggaatccatggattacctaagccagcccctccagttcggctaagaaactctagtctatatatcaagttttgtatcatatgtattgctctgaactcagaaatttcccttccatttatggattctatgaataaaatatcacatgtacaaaaaaaaaaaaaaaaaaaaaaaaaaaaac

SEQ ID NO: 58473 - DNA, 597 bp, Homo Sapiens
ttctaaaatgtctttatttttaaaacctatagtttcaatttagtaaaaaatattgccatgaaatttctaactatacagcaacagaaacaaaaaaatacagttaattagaggttactcaaaataaattcacaattttaaagttggaatatatatgcttttttcaaataaacaaaagatattttttcagatgtttttcctcttaaacatcagatatacataatcttttgaactggagctagatgacctctcaataacttcagaaataagtgcttatattaacatggaaaataaaataacccccaaaccatacaattaatgatttactcataaaactaaaacccaaatagatcattgctttaaaatatctacctcttgaaaatgaaatctacatctgagttgtgaagaggaataagctttttatagaaaaagctgaatcttccagactggttaagttacttcctatcaaatttatcctattcagactattttcatatgtcttaatcctgaaagaatgtgaggtgttaaaatatgaaatgcttctttggccctttagatagaggtaccttaactgtaaacaactgcaatgagagccttaga

SEQ ID NO: 58474 - DNA, 5787 bp, Homo Sapiens
catttttctcaagacacttcttcagagaaaaatggttctctcagtattcactgtaagctgattgaatgctagatgtggttaatagtacacctggcaacttttacatatatgggtagaataaatagaatagccaacatggtatcaacaaaaagcttcggggtttagactgggaaaattagcatttcatgatatgactgttatgtggaagaatttttgcatttttccatttaagattggctaggaagaaattgtgttcctcctatttaaatcatctctaggtgaagataaccgacaataaagtagtattgtagagtcctgtctcttctgttggaaccagtctactacttcatttcaagaatgtggtctttatatgccctttagattattagaaagagattggctactattcttctttgctgtgtgcttcttttttttttttttgcatgtcttgctgttttgctaatttattgacccccaacctgctctaactcaccttcctcatttctgtcacagggcttcccacctcgactgccaccacagtacccaggagattcaaatattgctccctcttccaacgtggcttctgtttgcatccattctacagtcctatcccctcccatgccgacagaagtactggctacacctgggtactttcccacagtggtgcagccttatgtggaatcaaatcttttagttcctatgggtggtgtaggaggacaggttcaagtgtcccagccaggagggagtttagcacaagcccccactacatcctcccagcaagcagttttggagagtactcagggagtctctcaggttgctcctgcagagccagttgcagtagcacagccccaagctacccagccgaccactttggcttcctctgtagacagtgcacattcagatgttgcttcaggtatgagtgatggcaatgagaacgtcccatcttccagtggaaggcatgaaggaagaactacaaaacggcattaccgaaaatctgtaaggagtcgctctcgacatgaaaaaacttcacgcccaaaattaagaattttgaatgtttcaaataaaggagaccgagtagtagaatgtcaattagagactcataataggaaaatggttacattcaaatttgacctagatggtgacaaccccgaggagatagcaacaattatggtgaacaatgactttattctagcaatagagagagagtcgtttgtggatcaagtgcgagaaattattgaaaaagctgatgaaatgctcagtgaggatgtcagtgtggaaccagagggtgatcagggattggagagtctacaaggaaaggatgactatggcttttcaggttctcagaaattggaaggagagttcaaacaaccaattcctgcgtcttccatgccacagcaaataggcattcctaccagttctttaactcaagttgttcattctgcgggaaggcggtttatagtgagtcctgtgccagaaagccgattacgagaatcaaaagttttccccagtgaaataacagatacagttgctgcctctacagctcagagccctggaatgaacttgtctcactctgcatcatcccttagtctacaacaggccttttctgaacttagacgtgcccaaatgacagaaggacccaatacagcacctccaaactttagtcatacaggaccaacatttccagtagtacctcctttcttaagtagcattgctggagtcccaaccacagcagcagccacagcaccagtccctgcaacaagcagccctcctaatgacatttccacatcagtaattcagtctgaggttacagtgcccactgaagaggggattgctggagttgccaccagcacaggtgtggtaacttcaggtggtctccccataccacctgtgtctgaatcaccagtactttccagcgtagtttcaagtatcacaatacctgcagttgtctcaatatctactacatccccgtcacttcaagtccccacatccacatctgagatcgttgtttctagtacagcactgtatccttcagtaacagtttcagcaacttcagcctctgcagggggcagtactgctaccccaggtcctaagcctccagctgtagtatctcagcaggcagcaggcagcactactgtgggagccacattaacatcagtttctaccaccacttcattcccaagcacagcttcacagctgtccattcagcttagcagcagtacttctactcctactttagctgaaaccgtggtagttagcgcacactcactagataagacatctcatagcagtacaactggattggctttctccctctctgcaccatcttcctcttcctctcctggagcaggagtgtctagttatatttctcagcctggtgggctgcatcctttggtcattccatcagtgatagcttctactcctattcttccccaagcagcaggacctacttctacacctttattaccccaagtacctagtatcccacccttggtacagcctgttgccaatgtgcctgctgtacagcagacactaattcatagtcagcctcaaccagctttgcttcccaaccagccccatactcattgtcctgaagtagattctgatacacaacccaaagctcctggaattgatgacataaagactctagaagaaaagctgcggtctctgttcagtgaacacagctcatctggagctcagcatgcctctgtctcactggagacctcactagtcatagagagcactgtcacaccaggcatcccaactactgctgttgcaccaagcaaactcctgacttctaccacaagtacttgcttaccaccaaccaatttaccactaggaacagttgctttgccagttacaccagtggtcacacctgggcaagtttctaccccagtcagcactactacatcaggagtgaaacctggaactgctccctccaagccacctctaactaaggctccggtgctgccagtgggtactgaacttccagcaggtactctacccagcgagcagctgccaccttttccaggaccttctctaacccagtcccagcaacctctagaggatcttgatgctcaattgagaagaacacttagtccagagatgatcacagtgacttctgcggttggtcctgtgtccatggcggctccaacagcaatcacagaagcaggaacacagcctcagaagggtgtttctcaagtcaaagaaggccctgtcctagcaactagttcaggagctggtgtttttaagatgggacgatttcaggtttctgttgcagcagacggtgcccagaaagagggtaaaaataagtcagaagatgcaaagtctgttcattttgaatccagcacctcagagtcctcagtgctatcaagtagtagtccagagagtaccttggtgaaaccagagccgaatggcataaccatccctggtatctcttcagatgtgccagagagtgcccacaaaactactgcctcagaggcaaagtcagacactgggcagcctaccaaggttggacgttttcaggtgacaactacagcaaacaaagtgggtcgtttctctgtatcaaaaactgaggacaagatcactgacacaaagaaagaaggaccagtggcatctcctccttttatggatttggaacaagctgttcttcctgctgtgataccaaagaaagagaagcctgaactgtcagagccttcacatctaaatgggccgtcttctgacccggaggccgcttttttaagtagggatgtggatgatggttccggtagtccacactcgccccatcagctgagctcaaagagccttcctagccagaatctaagtcaaagccttagtaattcatttaactcctcttacatgagtagcgacaatgagtcagatatcgaagatgaagacttaaagttagagctgcgacgactacgagataaacatctcaaagagattcaggacctgcagagtcgccagaagcatgaaattgaatctttgtataccaaactgggcaaggtgccccctgctgttattattcccccagctgctcccctttcagggagaagacgacgacccactaaaagcaaaggcagcaaatctagtcgaagcagttccttggggaataaaagcccccagctttcaggtaacctgtctggtcagagtgcagcttcagtcttgcacccccagcagaccctccaccctcctggcaacatcccagagtccgggcagaatcagctgttacagccccttaagccatctccctccagtgacaacctctattcagccttcaccagtgatggtgccatttcagtaccaagcctttctgctccaggtcaaggtaataaagcaaccatcatcgtccaaaaacaataaaatggagatgttgccatacctgggacaaaagcctgttaaggcgggttgggagactagctgaccagaacacagcctgtgtgttgtacactgaagaatctgggtgaaaagggaagtggagtgataatgagaatcggtgggctcactgctcccattaggtgaaattactttttttcaaggaattacagtgaaaagttacatctgtgtggcctatatgacttgctcatttgggatttggaacttaggctttaatattaggctgagatttcctggatgaaattctaaggtgttttagcagtttctgaagctaatacattttcttagccattgtagaattttgttacttttaagtatgggagtggcatactaaaatgaataaccttacaattcagttttttatccataatctactttccaaatatagctctgtttattagtgattgctgaaaaaattcccacagaggaaagagcttttagtcatattagaacaagaattgaaaagacttgggcatctgggtgagaagaatgaaaaaaatataggtactggcttatgtgcctttgccacagtttcacagaaattagagatcagtctcttcacaggaagaatgcacttgattggtaaggagggcaaactagctagcattattcgaactaagaaaagcttccgcattttgcagatgggtagaattaagacctaatatttcatctcttacatatctgaccttccccccagaagcttgttcttctgtgtgccatcttagtgcatttcaccactccagcctcaagtttctaacatcttgtagttgtgttctgtctcttctcctctctctgttctaccctgtttttcccctctcacaggctgtgcgaagtttaactgtgcatctgaacaggtgacattcaaacctggtggcaggaggacccgatttctgagtacgccctgcttggctctttgtgtgtaacacctttactccttccttgtccttgtgtttctgctgcttggatctgatgtttcacgcagtccattttcatttgtctctttttgtatatcatctactcagtggcttggctgaattactgttaccctcagaagtttgggcccccacattaattatgataaaaaatgtcaaaataacaagttatctacaaatttcaatgtaactttctggtagaagtgcttcttcatggatctgtgacagagagtggatatggtatctaggcaatagattgctgggtcatttagaataatgaagactgaactccacagtcgtagtcagtgctgtctgtctgccctagcattagaaatgagagaaatcagccagacacggtggcgtacacctgtaatcccagcactttgggaggccgaggcgggaagattgcttgaggccaggagctcgagaccaaccctgggcaacatggtgataccccatctct

SEQ ID NO: 58475 - DNA, 522 bp, Homo Sapiens
  misc_feature (497)..(497): n is a, c, g, or t
cgcatcagcatccttgctgctgccgatgctggaatggctagtgatgctgttgaggcttgagatgctatctgaggagttttgtctcttgatccgaagttctttgggtgtggtttctgaggcattaagggctccctgaatgactgcctgggcctcagagttctttttcttcagaaagtctatggtttctcgcaaatccagcagctcagtgtccttctcctcggccgtctctgccaggtgtcgcaggcgggatgtcatattcaccaggctctgctcaaaagcagccaccagattagcattggcagaaagctgagacgtcaaggtggccactttttcctgggatgattccagttccctacgaagcttccggatttgctcagattgcatcctctcctcagctgaggagtaggtggaggaggcactggaggccagggacagcactgagccgtgaacatcgtccgtggggtctcggaaggatcctgaccgaatcattcccttgngtctctcggccagggacagggtgct

SEQ ID NO: 58476 - DNA, 444 bp, Homo Sapiens
tcccaaatgtactcatacatttatttgctgctggtccacataaattgcttataattagttacatttctcccaaaacaattgaaaacaattcagtaagctttacttaaatgatttggggcttttcatgggcttttgctttgcaaatagcatacttcatttttacaaatgaagaaatagccttaatatataaaactcctcaaacttaggaggggagataaattgggataaaaagcaaggaaagacacaatattttagtttgtaaaattggtttatttacaaattggtattttaaaattgtatttgaaatttttatttttatatatttccctggcaggcattctatattttcttaaatatggaggcaaaggataggaaacctgagtaaatttaagagatttacctgctgctacagtcagtaaaatttaacttttaatccctgagtat

SEQ ID NO: 58477 - DNA, 3198 bp, Homo Sapiens; identical to SEQ ID NO: 23055

SEQ ID NO: 58478 - DNA, 2919 bp, Homo Sapiens; identical to SEQ ID NO: 31897

SEQ ID NO: 58479 - DNA, 2745 bp, Homo Sapiens
acctccctccgcggagcagccagacagcgagggccccggccgggggcaggggggacgccccgtccggggcaccccccccggctctgagccgcccgcggggccggcctcggcccggagcggaggaaggagtcgccgaggagcagcctgaggccccagagtctgagacgagccgccgccgcccccgccactgcggggaggagggggaggaggagcgggaggagggacgagctggtcgggagaagaggaaaaaaacttttgagacttttccgttgccgctgggagccggaggcgcggggacctcttggcgcgacgctgccccgcgaggaggcaggacttggggaccccagaccgcctccctttgccgccggggacgcttgctccctccctgccccctacacggcgtccctcaggcgcccccattccggaccagccctcgggagtcgccgacccggcctcccgcaaagacttttccccagacctcgggcgcaccccctgcacgccgccttcatccccggcctgtctcctgagcccccgcgcatcctagaccctttctcctccaggagacggatctctctccgacctgccacagatcccctattcaagaccacccaccttctggtaccagatcgcgcccatctaggttatttccgtgggatactgagacacccccggtccaagcctcccctccaccactgcgcccttctccctgaggagcctcagctttccctcgaggccctcctaccttttgccgggagacccccagcccctgcaggggcggggcctccccaccacaccagccctgttcgcgctctcggcagtgccggggggcgccgcctcccccatgccgccctccgggctgcggctgctgccgctgctgctaccgctgctgtggctactggtgctgacgcctggcccgccggccgcgggactatccacctgcaagactatcgacatggagctggtgaagcggaagcgcatcgaggccatccgcggccagatcctgtccaagctgcggctcgccagccccccgagccagggggaggtgccgcccggcccgctgcccgaggccgtgctcgccctgtacaacagcacccgcgaccgggtggccggggagagtgcagaaccggagcccgagcctgaggccgactactacgccaaggaggtcacccgcgtgctaatggtggaaacccacaacgaaatctatgacaagttcaagcagagtacacacagcatatatatgttcttcaacacatcagagctccgagaagcggtacctgaacccgtgttgctctcccgggcagagctgcgtctgctgaggaggctcaagttaaaagtggagcagcacgtggagctgtaccagaaatacagcaacaattcctggcgatacctcagcaaccggctgctggcacccagcgactcgccagagtggttatcttttgatgtcaccggagttgtgcggcagtggttgagccgtggaggggaaattgagggctttcgccttagcgcccactgctcctgtgacagcagggataacacactgcaagtggacatcaacgggttcactaccggccgccgaggtgacctggccaccattcatggcatgaaccggcctttcctgcttctcatggccaccccgctggagagggcccagcatctgcaaagctcccggcaccgccgagccctggacaccaactattgcttcagctccacggagaagaactgctgcgtgcggcagctgtacattgacttccgcaaggacctcggctggaagtggatccacgagcccaagggctaccatgccaacttctgcctcgggccctgcccctacatttggagcctggacacgcagtacagcaaggtcctggccctgtacaaccagcataacccgggcgcctcggcggcgccgtgctgcgtgccgcaggcgctggagccgctgcccatcgtgtactacgtgggccgcaagcccaaggtggagcagctgtccaacatgatcgtgcgctcctgcaagtgcagctgaggtcccgccccgccccgccccgccccggcaggcccggccccaccccgccccgcccccgctgccttgcccatgggggctgtatttaaggacaccgtgccccaagcccacctggggccccattaaagatggagagaggactgcggatctctgtgtcattgggcgcctgcctggggtctccatccctgacgttcccccactcccactccctctctctccctctctgcctcctcctgcctgtctgcactattcctttgcccggcatcaaggcacaggggaccagtggggaacactactgtagttagatctatttattgagcaccttgggcactgttgaagtgccttacattaatgaactcattcagtcaccatagcaacactctgagatggcagggactctgataacacccattttaaaggttgaggaaacaagcccagagaggttaagggaggagttcctgcccaccaggaacctgctttagtgggggatagtgaagaagacaataaaagatagtagttcaggccaggcggggtgctcacgcctgtaatcctagcacttttgggaggcagagatgggaggatacttgaatccaggcatttgagaccagcctgggtaacatagtgagaccctatctctacaaaacacttttaaaaaatgtacacctgtggtcccagctactctggaggctaaggtgggaggatcacttgatcctgggaggtcaaggctgcag

SEQ ID NO: 58480 - DNA, 555 bp, Homo Sapiens
ttttttttttttttttttttttgtctgaaaatgtttttatttttacttaagcacaaaaattgagacgtaacatatacatttgtacatagaggggaaaaaataccagaaaggagttcataaaaccccagccgctgccagtatcattcagtggctggggcctgcggctgtctcgggcccagagccggaggctagttttgtgggaaggcaccccagtccacacacccactcggcagcctcgagggacagggtgctggttttaagggtggactcctacgtgtcccatcacagtgacacaccccccagggtgtgaaccagactccactgggtattagggggccctccgagagatggcttatcagtccctgctgagggatgcggttctggactggctggccctgcccttcctgaaagtctggatgctgctgatggggagcatgggcggggcaggtggcatctgaggcagagacaaaggcagccgtccctcggttcggggaggggggggggtagtcacagcaaacagggccaaaccaaccacaccaggacaggcagacccca

SEQ ID NO: 58481 - DNA, 6469 bp, Homo Sapiens
ggcgaccctgccctcccgaccctcatgttcgaagagcctgagtgggccgaggcggccccagtagccgcgggccttgggcccgtaatctcacgacctccgcctgcggcctcctcgcaaaacaagggctccaagcgccgccagctcttggccacattacgggccctagaggcagcatctctttcccagcatccccccagcctatgtataagtgactctgaggaggaggaggaggaaaggaagaagaaatgccccaaaaaggcatcatttgccagtgcctctgctgaagtagggaagaaagggaagaagaaatgtcaaaaacagggcccaccttgcagtgactctgaggaagaagtagaaaggaagaagaaatgccacaaacaggctcttgttggcagtgactctgctgaagatgagaaaagaaagaggaaatgccagaaacatgcccctataaattcagcccagcacctggacaatgttgaccaaacaggtcccaaagcctggaagggtagtactacaaatgatccaccaaagcaaagccctgggtccacttcccctaaaccccctcatacattaagccgcaagcagtggcggaaccggcaaaagaacaagagaagatgtaagaacaagtttcagccacctcaggtgccagaccaggccccagctgaggcccccacagagaagacagaggtgtctcctgttcccaggacagacagccatgaggctcgggcaggggctttgcgagcccgcatggcacagcggctggatggggcccgatttcgctacctcaatgaacagttgtactcagggcccagcagtgctgcacagcgtctcttccaggaagaccctgaggcttttcttctctaccaccgcggcttccagagccaagtgaagaagtggccactgcagccagtggaccgcatcgccagggatcttcgccagcggcctgcatccctagtggtggctgacttcggctgtggggattgccgcttggcttcaagtatccggaaccctgtgcattgctttgacttggcttctctggaccctagggtcactgtgtgtgacatggcccaggttcctctggaggatgagtctgtggatgtggctgtgttttgcctttcactgatgggaaccaacatcagggacttcctagaggaggcaaatagagtactgaagccagggggtctcctgaaagtggctgaggtcagcagccgctttgaggatgttcgaacctttctgcgggctgtgaccaagctaggcttcaagattgtctccaaggacctgaccaacagccatttcttcttgtttgatttccaaaagactgggccccctctggtagggcccaaggctcagctttcaggcctgcagcttcagccatgtctctacaagcgcaggtgacctctggatcttccttgaaaggggaggcagatctcaaactccaggctcagaactgtgaagactgtttccagcctggctgtgagccaagacctggttcctggtggaccctgaggacaaagtgtgataaaacctctggctcagacttgctctactgaaggcttcttggttataagatgcataaagtcactggggctagctaaacaataaagagtttattgtgagaacatggggatatctgtctcatgacacttcaggtgttatgaaaactagatggtttggaattcaaggcatctttaggttttgctcttctttccaactaagaagccacatggccttcctgtcctgccatctccactctgctgtcatctgatctgtctacagatcagcttcctctgctcacccatagcttctgctccttcagcttcagtttgcccaggccttcaaggttgcagacaggcagctgttgctgtttgactctgaggcaactggttgtccaccaacatcttggctcaagacatcagtctgagccaccaacttgagactgtttggttgtccccataccgagcatttctagtggtttatctttcccctctcccctcatctccatttttggaaccatatagcatcaagccactcccaacacctattgtcctgtgggactttgggatgtatatagctgagagcacagattttggaatcaggtagacctggatttaattcttggcctgctacccagaggcacttaaagtcatttaatctctgtatatcacattcctcatttggaaaatggtagaatttttgtcttgcagggtggttgtgtgggttaactggagaaatctgtagccagggctgggaacataggaggtgctcagtaaactagctatgactattatgtgttgtaagccttattgttttttgaagatcttccctaggctggttggaggctgaggggtaaagaatggatttgttgactaaggaagcctctgggagaggctagacctttcaacaggcctgcttcataggctatttaatgacttttaatagattctgagcttctgtccttggaggggtagtgagggagctgggtctctgttcataaacaacttgttgatgccatgtgggcttgggggcattgggctgttcattggcggaagagtctgtccactatctctgccttgcagtggactcagatcagcatgtcctgggaaagctataggcaaggtgctgagggaaggtgagtttgaatgatagattctaggcctcccccaaaaggtatctgccatgtgcccaggtataaagatatggcctcttgtacttgtttccaggaatacctgacagtacccattgggagatcataggttctatgccctgagccagttggatgcctctaataaggggatggaggttttgaaacaggctgtagtccagagggcatgtttggaggctgggctgtgaatcattaggcaggcactacacagtgcctctacacgtactgttctttctgctggatattcatcggactggcagtttgctcatctttccgaacagcctagttgtttcctattctactcccaaagcaaaatcagttcttcatctgtactctcaaagtactatgtgaagagtgctacttcagcttctaaatattgcattgtgattcctttgtgcatttggctgttgttttctcaagccatgtttatctttgtattcccggagcttgtcatttgagatatagccagtgtacttattcacctagggagagataaggaatgacagggtccagttgagtgggatagatgagaacaggggtgttatagaaacccaggtactagggcacaagatgagggcactgttgactagtcatgatggaagaagtaggcagacaggagaacttcattaggtagaattggtgggatgttgaggttggtaagagaggaatctgaagtaagttccaggttgctcaactgtgggtaggctggtgatgccattcaaagtgttggattttaggaagtgggacatgcgtgaaatctgtgctgggggtctgggaatcagcagcctagaggtggtaattaaagtcagaatagatgagatattcagggtaagataatgagaagagaaaatggctcagaatagaactgaggagcatgtcatggatgggtaaaggaaaatgaagcagtgaaggtgatggaagaggagaaggttcacccagagatgtaggagtaaaaccaggagagttaatttttttttttttttttttttaagacagagtcttgctctgtggcccaggctggaatgcggtggcgtgatctcaggtcactgaaacctctgcctgctggttcaagcacttctcctgcctcagactcccgagtagctgggaatacaggcacatgccaccacgcccagctaatttttgtatttttagtagtgacggggtttcaccatgttggccaggctggtctcgaactcctgacctcgagtgatcggcctgcctcggcctcccaaagtgctgggattacaggcatgagccactgtgcccagccagtgtttttttttttttttttttttttatgggaggatgggcaggttgttagctgtcgagtgctattgagatgagagagaactcagaatgcagtggggtaaggattgctgagtaatgtggagggcctgtttgaggtaaatggcagtggtaagaggttgctccattatgaaagccctcttccagagttcctgatagggccccagaagttcatttctgattgctttgattttttttcaggggagcaggaagccagtttatcatttgagagtgagaataggggagaggaaatatcttccaggcccacagtgcatagaaatacccagtcagggcaaaatgatttatctgtttacctctcctcatcacttgggcccagagcaatcagcagtgattaggtagagaggagccgaggagagggaagagcataccaatcactcctccctttcccagtgcaggctcctagacttagctggggcagagctgggagaggaaaaagggatttaaaactgcaacaggtgcagattattgttacacaggattagacattctaattaattgagattatgtttgttccttaaactgatcacaggactatctattaagaacatcacaacctcgctgcagcttttctccatagcagggagagtacctcccagtgaataaaatttggagggtggtaagagacaagaataaaattgggtttggttatccgtgcctcatgcttgttcagcatccctttgagagttctccaaataaatagttactgcttctgcagttattggtgtgctccagcttctgttcccataatatagtccagtcctaagggaacacagttctaaaagaaacaacatgatcttggcagagacaccgctcagctccaaacccaaccatttatgtaactgcacaaaactctctacagcttttcacagagaccagtaattagaacctttcatcccctggtcatcctccttcccaggtgaattctctgaccagccatctggttttaggatacccaactcctgcagtaactgccttactggtggtctaattgcttctactcgtgtccctaaagcaattaattttccacacagccatgtgatctttttaaaatgtaaatcagcttatgtcacttctctgcttaaaatccttcaatggattctcactgcctcgagaacaaaagacaaacttttcaggccccgtgtgatcttgcccaggcctccgtcaccatcaccatctgcatcttaacccactcctcccctttcacaaaactccagccacacagacttgctttttattcctcaagctttccaaactgtttgtactgagagtctttgcacatgctccatcttccttgaatactctttccccagtgagctcattttcatcttcctgaattcataccactattacctttgcttctgtggaagaaactggccagatgctcacccaaatgtcctctttctggacacaggtaaactgcatttcccagctccatgcatctaggcctatgtgagtagttctcaacagtggaaaatgagtggaagtgatgtttcaatactagaccaaggcagttaaagggtggctgagccatttccattattctcttcctccttcctcttcaaggtaaccttgaagcacatgttttgacggtgatggagtcatagcatagaagaagtctgaatacctgagttactatttagggcataatagctacttgaccaaaaacatccatattggactttgaacaagaaaataaacttgattacattctgctagtgagttttgagggtgttttagcagttatcattatatacactggatatatcttctatggtatcctgtccaccttactcttgaccacagtaccctctttgtttccttcagggtgtttcagatatttaattatcttgccagatgccagtcaacactttctttttgtcccatgagtttaaaatcaggggaaaacatgtactcccaataggaagttgagatactcttttttttttaaatccgtcattgtgactgtgaccagaaaaacaaatcccactaaagaatgtcctaaacagatgtttttttttgtcatataacctggagttaggtgatttggcattggttctggagctgaaggatgttagggatgaagtctctgtagttttcttgtctcatggtcacgaaatgaagtgttattgattaagcagggatgccctacttagtattagacttcttggaagtctccttaattgccacagctcctatctttttggcttcgtttcaagggtccttctacattgttaatactctggtataaatacgttccattattccctataacatgactgaaaccaatctaaagtattaacattttaaatatgtttttgggccaagtgcagtggctcttatctgtgatcccagctactaggaaggctgaggtgggaggattgcttgagcccaggaatttcaggctgtagtgagctatgattgtgccactgtactccggcctggataactgagatcctgtctcaataaataaataaaacaatt

SEQ ID NO: 58482 - DNA, 3017 bp, Homo Sapiens
acttaggctaggtcgaggctgggtgtgaatcggccgagggttggcagaagggtcccgggcccagagccagcggggccgtgctgagacggcgtcgtgccctgcgtagtgcgtgcggcggcgcgtgcgctaggggagtgggcggtgatggcctggtccacgtgcgtcccttcccgggacccccgcagcttggcgcccagcggctacgtgagccaaggcacccggatgtcctgcgcccctctccgagtgacaagtcccggcctccggtcccgcagtgcccgcagcctcggccggcgtccacgcattgccatggtgactgtgggcaactactgcgaggccgaagggcccgtgggtccggcctggatgcaggatggcctgagtccctgcttcttcttcacgctcgtgccctcgacgcggatggctctagggactctggccttggtgctggctcttccctgcagacgccgggagcggcccgctggtgctgattcgctgtcttggggggccggccctcgcatctctccctacgtgctgcagctgcttctggccacacttcaggcggcgctgcccctggccggcctggctggccgggtgggcactgcccggggggccccactgccaagctatctacttctggcctccgtgctggagagtctggccggcgcctgtggcctgtggctgcttgtcgtggagcggagccaggcacggcagcgtctggcaatgggcatctggatcaagttcaggcacagccctggtctcctgctcctctggactgtggcgtttgcagctgagaacttggccctggtgtcttggaacagcccacagtggtggtgggcaagggcagacttgggccagcaggttcagtttagcctgtgggtgctgcggtatgtggtctctggagggctgtttgtcctgggtctctgggcccctggacttcgtccccagtcctatacattgcaggttcatgaagaggaccaagatgtggaaaggagccaggttcggtcagcagcccaacagtctacctggcgagattttggcaggaagctccgcctcctgagtggctacctgtggcctcgagggagtccagctctgcagctggtggtgctcatctgcctggggctcatgggtttggaacgggcactcaatgtgttggtgcctatattctataggaacattgtgaacttgctgactgagaaggcaccttggaactctctggcctggactgttaccagttacgtcttcctcaagttcctccaggggggtggcactggcagtacaggcttcgtgagcaacctgcgcaccttcctgtggatccgggtgcagcagttcacgtctcggcgggtggagctgctcatcttctcccacctgcacgagctctcactgcgctggcacctggggcgccgcacaggggaggtgctgcggatcgcggatcggggcacatccagtgtcacagggctgctcagctacctggtgttcaatgtcatccccacgctggccgacatcatcattggcatcatctacttcagcatgttcttcaacgcctggtttggcctcattgtgttcctgtgcatgagtctttacctcaccctgaccattgtggtcactgagtggagaaccaagtttcgtcgtgctatgaacacacaggagaacgctacccgggcacgagcagtggactctctgctaaacttcgagacggtgaagtattacaacgccgagagttacgaagtggaacgctatcgagaggccatcatcaaatatcagggtttggagtggaagtcgagcgcttcactggttttactaaatcagacccagaacctggtgattgggctcgggctcctcgccggctccctgctttgcgcatactttgtcactgagcagaagctacaggttggggactatgtgctctttggcacctacattatccagctgtacatgcccctcaattggtttggcacctactacaggatgatccagaccaacttcattgacatggagaacatgtttgacttgctgaaagaggagacagaagtgaaggaccttcctggagcagggccccttcgctttcagaagggccgtattgagtttgagaacgtgcacttcagctatgccgatgggcgggagactctgcaggacgtgtctttcactgtgatgcctggacagacacttgccctggtgggcccatctggggcagggaagagcacaattttgcgcctgctgtttcgcttctacgacatcagctctggctgcatccgaatagatgggcaggacatttcacaggtgacccaggcctctctccggtctcacattggagttgtgccccaagacactgtcctctttaatgacaccatcgccgacaatatccgttacggccgtgtcacagctgggaatgatgaggtggaggctgctgctcaggctgcaggcatccatgatgccattatggctttccctgaagggtacaggacacaggtgggcgagcggggactgaagctgagcggcggggagaagcagcgcgtcgccattgcccgcaccatcctcaaggctccgggcatcattctgctggatgaggcaacgtcagcgctggatacatctaatgagagggccatccaggcttctctggccaaagtctgtgccaaccgcaccaccatcgtagtggcacacaggctctcaactgtggtcaatgctgaccagatcctcgtcatcaaggatggctgcatcgtggagaggggacgacacgaggctctgttgtcccgaggtggggtgtatgctgacatgtggcagctgcagcagggacaggaagaaacctctgaagacactaagcctcagaccatggaacggtgacaaaagtttggccacttccctctcaaagactaacccagaagggaataagatgtgtctcctttccctggcttatttcatcctggtcttggggtatggtgctagctatggtaagggaaagggacctttccgaaaaacatcttttggggaaataaaaattggactgtgaaaaaaaaaaaaaaaaa

SEQ ID NO: 58483 - DNA, 624 bp, Homo Sapiens
tttgacacccaagaccatcctttattgtagtattagttcatggtaactgcatgaaaaaacatttcaggaggaatttacaatttccagcttaaagaacttgcccaccaacataaccaatttatgaaagtcaattcattaaaaggtatagaacctcttgttgggcatgatggcaagggacaaagctacaacttggcctgtgcctttggaagctgaggcaggaggaccatctgagcccaggagcctgagaccagcctgggcaacatagagaatccgtctcaacaaaaaaaaaattttagccaggtgtgctgtgagctgtagtcccagctacaaggtgggaggattgcttaggcctgggtgattgaggatgcaatgagctgtgattgtgccaccacactccagcctgggcaatacagcaagactgtctcaaaaaaaaaaaaaaaaacccaaaaaaactcaaaaatgtaatgaatgatacccaatgtgccttttctagaaaaagttgccaaatatatctcttggatctgctgagcatgtcctctgatacataaggcaagcatgtttctacacccagtgttgatgccagttagttttcagaatccaaactgatggcagctactggtcctt

SEQ ID NO: 58484 - DNA, 479 bp, Homo Sapiens
  misc_feature (333)..(333): n is a, c, g, or t
  misc_feature (386)..(386): n is a, c, g, or t
  misc_feature (403)..(403): n is a, c, g, or t
  misc_feature (418)..(418): n is a, c, g, or t
  misc_feature (466)..(466): n is a, c, g, or t
  misc_feature (477)..(477): n is a, c, g, or t
gacattgtttaataggaaaagttgtaccagcatcttcatattattgagaaaattttttccagcatgggcacttagaaaaagcacatggcaaatggctctttgttcctttcagatattatttcagtagaacctggcattctcctttcaccttaaaagatccatctaagtctcagatctggaaacgttttgtaccgattatccacagcaaaacaaaaataagcttttattttattaataatttcgttcctcttgtgcccaatcaaatcttttaggaacaaactggaagaaaagctaagaatgttttagagtgaactaaatacagacattggcttnacttgttttgaagagggttttggttttggttattgtgtctttttaagttttcntgatatggccccctttncaatatttagggtanttattttgttggggaggattaccctaaaatggagggggtcctattccnggttctggggntt

SEQ ID NO: 58485 - DNA, 562 bp, Homo Sapiens
  misc_feature (494)..(494): n is a, c, g, or t
  misc_feature (509)..(509): n is a, c, g, or t
gaaattcaggcgatttattgtaaacaggataaccctagcactccaccatactggctgtgtcacatgctccctctttcacatcaactggtcaaaaaagaagactttcttaagaagcctcaggtaactaataacttagttccacaaatctcatttactaagcactgcgtaaactgcagtatctggggtagtctgttattgctcatggactgcagcttggacccatctaaatgaatccattagtatgcctgagtgatcaacagcagctctagatccaacctggaaattggaaaatgctgacgcataccaaacaattgcaggttcatgggaagactacatgagattgctctcagatctcttcatgtgtcattctcataaaaaagacacttaaatttcacccattttttaaaaaagagctaaaagttactcaatagcacataattttccacataaaaggtaggtggatttttatttactagtacagtgggtggatcggnacactcaggcctaanttcagatctggtcctggtataacctgcaggtttaatggaaagctggcaagtct

SEQ ID NO: 58486 - DNA, 511 bp, Homo Sapiens
  misc_feature (398)..(398): n is a, c, g, or t
  misc_feature (452)..(452): n is a, c, g, or t
  misc_feature (467)..(467): n is a, c, g, or t
  misc_feature (475)..(475): n is a, c, g, or t
  misc_feature (485)..(485): n is a, c, g, or t
gtgggtatttttctatttttagtattctggcagcaaatttgaggttgtacacatttcattatcaactaaacaaaacaagaagcaagcaaatactttaaggttttcacagcctttttcatcacagggaaggaaaaaactgtgtgtgtgtgtgtgtgtgtgtgtgtgcgtgcgtgtgtcgtctttccaaattcctggccacatcaatagtctagaaagtgcttatcaggacaccaaatatttctgtgttcctgagataggtctgaaatttttacccagtattgaatgtatacctgaagtggtcaaataatacttcttataaaaaagttgttctacctaagattatagttttaactttaaattaaagaatgggccacaattaaccaacatgcaaaaattcnccagactaaaacaccggagaaattccctccatacaatggccatttggcccaccnttattggcaattttnaaaatccnttaatcccgnaggtgaattgggaattccccaatctg

SEQ ID NO: 58487 - DNA, 3999 bp, Homo Sapiens
gagagatggccctggacccagaactgttgcttctgagggatgatggagaggaggagtttgcaggagcaaagctggaggattcggaggtccggtccgttgcctcaaaccagtcagagatggagttctcttcacttcaggacatgcccaaggagctggatccctctgctgtgctccccttagactgtctgcttgcttttgtgttctttgatgccaactggtgtggctacttgcaccggcgagacttagagaggatcctccttacccttgggatccggctcagtgcagagcaggccaagcagctggtcagcagggtggtgacccagaacatctgccagtaccggagccttcagtacagccgccaggagggcctggatggtggccttcccgaggaggtgctcttcggaaacctggacctgctgccccctcctgggaaaagcacgaagccaggtgctgcccccacagaacacaaagccttggtgtcccacaatggcagcctgattaacgtggggagcctgctgcagcgcgcggagcagcaggacagcggccggctctacctagagaacaagatccacacactggagctgaagctggaggagagccataaccgtttctcagccactgaagtaaccaataagacgctggcggcagagatgcaggagctgcgagtccggctggcggaggccgaggagaccgcccggacggcggagcgacagaagagccagctccagcggctgctgcaggagctccgcaggcgtctgacccccctgcagctggagatccagcgggtggtggaaaaggctgacagctgggtggagaaggaggagccggcacctagcaactgacggcctcgcacggaactgccatcctgtgagggcagcggtggcgcccggcaaagttggagcccttgcggtaccagaaagcagcgagagcgagacctgggagccagggcaggggtggctgaccccatgctcagcctctaggggacggcaggccatcaggctgggggctgtgctatgtgggatggatgtgtgaggaaccccggttccacttaacaactaaatacaacatcttttgcacccctagaatgtcattttgccctcaaccttggtatttctcctggggcccttttagtcttgtgctgactttctcctgtcctcttccagtttagaataagacaggggagaaaaaggcttttcgagtgtgggacaaggtctgatgtcagtgaacggaattgaagagcaagacatggagcctggctggggctaagcagccccctcctccggatggcacaggctctgctaggttccggacacaggcttctgggggaagggtctcccttggccatcacgggaatggagtccatgctagaaagagctcagtgttgggctgggtttgccagtagaacactgcgttccagtcaccccggtcttgccagaagaaaccagcacctctttcccgtggctcctgtgttcagaatgtggtattggctctggcccagccttctcccctgttacccataattcttgcctctttccataatccgtggtttcagtttgactttgtatataaagttggggttttttttttttttttttggcttgttttttaaataaaccaaagtcaaaaacaaactgagagtgtgtcctccacagctcttcctactctcctaggcttgcccgcgtgccctcccacccagcgcctctgctggaccacggtgcagttcgctccagaaggtgggccagggccggggaggtgcgcacacacccctggcatgctgggctgcctgctggagggtgctgctgctccgtggagggcagcaggcccaggaaggggtttcctctgctcgcctaagttacagcacaatactatgtggacgtttcattgaaaattttacttgaaaaaataaaattccagatactcaggtgagacacaaaaaaaaaaaaaaaaaactcgagactagttctctcggcggatatggctgcagagcggccggctgggatcttagataggaggggtggatttgcaaggcctagaatagctggggagtggtttccccgcggaatcggcctccctgccgctcctgctttgtactgtgacgctcagcctgtgatgactggtgtggaatccgctgagccaccttggcctaaggagactttaccactctgagattgtaaatctgtaaaatagagatgtaggattagcccatacggtagttgtggtaaatactgtgagacaataaggggcctgggacacagcattcaaatgggaataatgaaggtcaagactgtgattcctgtatctttgacgctctcggtataagcaccgtcgtgggcacagggcagtggcctttatgcaggagtttaagagggaatgaaggaatgaatgggcaaactctggagttcccaagtattctctccaggagctgtttccattcttttcgtttccagcaggttggtaaattcattaatttattcattgatctaattaaaatatactaagtgcccctcacctgtgctaggccaatgtgatacaatgagcagaacagtcatgggccctccctgggaagccctcactagcccaaggactccttgtagacatttaagtgtccacaggctctggagttccaaccttgagtgcaatttagcagctgtggaccttgggcaagtcattacatctaagcctgttttctcttctgcaaaatggttaaggattcaataagataaaactgtaggcaatgaaaaccgtacctggtaacagtaggtgctgaagaagtgttagctattaatttttgcttaatttttctctctctgctctatgtgatgaaaagattcaagaggcaattgttggaatgtaaaaagagcacgggacttggagtcaaatacttaagtctaccatcaagtagttgttaagaattaaacaacaatttttgtgtacccagttaaatgtgggctgcttaggaatgatgactgtgtcttaatgatctctgtattcttagtgacatgtagaatcattgtgcctgacacatagtatgtactcaggaaagaaatggaaaatgtggttttagcattgaaggccgggagagagggtctaacagactacaagccctgccaggagcagagtaagggaaacagaggagaaaagtgtttttagtctgtgcctgaatgtatttacatctgtttgtagcccaaaagccaaaagcgtacatacgcttggcttttctgtagctatgtttatggctttacagcagattttatggagctgcaattactttgatcatgagggactgatgctagtggatttacttcaccaaatggaactcactttgtggcttctgaagaagggacctttgtggactgtcatggagtagttaagagtgcaggctctgatttagtgatcagagtctgcattgtcaggaatgggacaaagtgaagttatgtggcacttgataggatgccctgagaagattgcaacatcacccctgtgatattcctgctgaagatccataacctggatgtaatcatgaggatatatcagacaaacccacgtaaagagacatgctgtatacaaaactgtaatcttagaaagtgccaaggtcatgaaaatcaaagatagaccctggaactgttccaaactggaggggaccaaagaggcatgacgactaaacacaacacatgattctgaactggatctttttgcttgaaaggaagttacagggacagttggaaaagtttaaatggggcctacgatgccgtggtaatgatgtgtccgtgttaatttcctgattttcatggttgcctgttaagttacatcagaggatgttcttgtttgctggaaagtaaatcaatgtatttggcaggggataaggcatcaaatggtcaccttaatttcaaattattacagggaaaatgtttctctctgtacttaataacttttttgcaatttcttaaaatgaaagctctggagtaaaaacttcaaggatccaaaaaaaaaaaaaaaaaa

SEQ ID NO: 58488 - DNA, 538 bp, Homo Sapiens
gtgctgataacagcggaatcccccgtctacctctctccttggtcctggaacagcgctactgatcaccaagtagccacaaaatataataaaccctcagcacttgctcagtagtttgtgaaagtctcaagtaaaagagacacaatacaaaaaaattctttttcggtgaagaactccaaaaataaaattctctagaggcaaaaaaaaaaaaaaataaaagaaaaagaaaaaggtgtggtcgggggcccacggggcccccaggaaagatgttttcaaacaccatgcccgcgggggcgcgcggcgggcccccagcaattggttgacggggacaaccgtggctaccagagggtggtccgccagaagggaagatccgcgggctcgagcgaacacggggcggggtttcttccccaattaagaagaaggcccggcgcggggaaccgcggaggctttcgtgaaacaaaattgcagatggggctgcgagggcacatgacggggatccactccggcggggctccccagcaggagcgaatagaattaggcc

SEQ ID NO: 58489 - DNA, 602 bp, Homo Sapiens
tttttttttttttttttttgtatcaaaagctgtgtttaatgatcagacggaatggcagcaaggccacacggacagacggagccaaggacaggaccgccgcctctgaacccctccccactggtcaaacgtccaacaccaaaaaagagacgtccccaccccgtccccatgtacaaaatggcttcagtgaaggcgccattactccctgggaagctggtattttttgtaagggatcagggctcacccctgccaccctctgtccggaacagacccgtgagagcgcagctcagcagtccccgtgtgcagctggggacgactgacttgacagaaacagattctggactcgagtctggaggccgcactcaacagggcgggtggcgggcgggactgtgggcccaggcaccacagacagccagggtgcgggctctgtctctgcggccacagggagcgctgcttcggaagtgaccacgtgcagcgaggggaggatgccggggcctggggcagcctcgggtcagtttccgaacggacgtttttgcccttgagtcatgaggaccccatcagtgagtaaaccatgccatgcaaatgtcctcgtgggtttcagaaac

SEQ ID NO: 58490 - DNA, 488 bp, Homo Sapiens
  misc_feature (407)..(407): n is a, c, g, or t
  misc_feature (417)..(417): n is a, c, g, or t
  misc_feature (445)..(445): n is a, c, g, or t
  misc_feature (484)..(484): n is a, c, g, or t
taatcattttttggttatgccaggtgtctcctgtgtgtccctccagatccctctccagccctagaaacctgagctctataaatgttgcctctctccactcatcttctctttggcttcaggttgagttcagccaacagatgcccctgtaggatttggacacagggagccaggggagaggggcatcagctgcctggttagcagggctgtgatgattcttctacctatgactctcagtgctgttgcctcttcctctggatcttggaagcttccatgctgaggtctgaaggtggctccctgcctcccactgatgtccttagaatcccatcctcacctaatacctggtattgaacactggctttcttagatgtcatttaggctctcgtttcaattcccagtatgcttcctgnaaaagacctngatagatgggactgaggggggaatagtngcaaggtcctcccatccccagtattgggatctaaggggnaggg

SEQ ID NO: 58491 - DNA, 573 bp, Homo Sapiens
  misc_feature (444)..(444): n is a, c, g, or t
  misc_feature (470)..(470): n is a, c, g, or t
  misc_feature (477)..(477): n is a, c, g, or t
  misc_feature (535)..(535): n is a, c, g, or t
  misc_feature (543)..(544): n is a, c, g, or t
  misc_feature (563)..(563): n is a, c, g, or t
  misc_feature (571)..(571): n is a, c, g, or t
catgtctcctttctaatattgcacatcaatagctccctagcagggaccagctgacgagacgcccccttccctcaagttggcttgaatgtggggctctttgggcaggaagctggggagggaacggggtggccgcagagctgagaggccacggggctcaggcaggttgcaggtccagcttactctggctggctctttggttggtctttggggctaagctgggatccattgttcccaaggacaccctatcccctcctacccccacccacttctactgggcagacaacagctggggtctgcccaaggacccttgggcaggggagctgcctctcctggagccatctgcccctcagtaccctccccttgcctcttcctcttccctcctccatgaggcctagagtggccacgaggtcagaggtcagaggaagcacgcaggtccaacttcangcggtactgcttccctgatgaggcangaaggangttgtccacactgatgatgggcaactgttgggggcttgggtccggaaggtgaaaatgntgatccannggcattttggaccttgaancattcccngg

SEQ ID NO: 58492 - DNA, 562 bp, Homo Sapiens
tttttttttttttttttggaacatacaggacaatttattgaagtcaatctcaagcaaaatctgaaatcagtggaatgtcattaaaaacctttccaaattaatcctcacggaagcaaaaaacacattggaattccaaagtatttgtaaaataaaaaaggcaacatctcagtaaatataatgtacaaaaattatatgttcctaccagcacacacatcagtaaagaagcttaaatattacaggcaaccctaaatacactataactagtcaacaataagctatctatatacaggttaaccaagctttacacgtttcacactatgcaataaaacataggccaatcaacaaaatcctcaaaatattatatatcttgaagtctatgtggcaacatcaagtcattatacagtaatgccctagtggaacacccccagggaaaattacactaatcccttagtgtcaagagcttctagccaagtcacagaaactcaaaagagattgactttagtgaatattgatgctttgttattaaagactcaagtctcaagtgatttaggcaaagtaatgg

SEQ ID NO: 58493 - DNA, 569 bp, Homo Sapiens
ttttttttaaaaaaactcaatatttatttttggctcctagaccagtttatttcactttccagcattcaaagaaatgtgatctgcaaaaaactagatacaaaggccttttacttctttacaaactacggttagttctcaatgaatttacatgcctcactttttattccaagaaaaatccccattatgcaatacaagggtgaaacagctgttacaaatacacagaaacataataaagataaccaacactgttaagaggaaggggaagaggaaaaaacccaagagaaggaaacttttccacagtgactagcagaatgtcttgtagataccaataaccgaagacaaacaggttgctcacttcatcctatttatcaagtcatcctatctaaaatgagaatagttcatgcctaggataggctaactataggctttgctagtcctccttcctaatagaatgccctcagattattcctgagctatcactcaagtcacagatacttcagaatataatcttaggttttgtaaacaggaacatggtcaaaatgcaatacaatggaaaatctctacaagag

SEQ ID NO: 58494 - DNA, 601 bp, Homo Sapiens
  misc_feature (489)..(489): n is a, c, g, or t
  misc_feature (499)..(499): n is a, c, g, or t
  misc_feature (529)..(529): n is a, c, g, or t
  misc_feature (568)..(568): n is a, c, g, or t
  misc_feature (582)..(582): n is a, c, g, or t
ttctgttaaactgtttaatgaatgcataaaaaggcagaaaaatatataaagccaaaagctcataataaaattaaatcatgatacaaccaccacaggcaattaccatcaaatacattcccatgatttacaaatgtatcgcttatacagaggaagttgcaaaatcactgccagtacagacacatccagtctaattaactatcgtctattcatacaacagcaacaactgcagctcctgagaccacagaaggacacagtgagcagctggtgactgagccagggtagcctccgatcaataactgatcagagtaatgagacttcgagaggaatgcctataagaaatctcaaaaggtatttgtttgggtgcagaaacaaatgcaccctccacatttggattttctctagaagaatctgtggccaaatctcttatccaatggagggtactgagtggctggatcagttaccatgcaagctcacgatgaatgagattgnatttgggtcngtgtgccactgggctctggggagggagganaccctgtgtgttgctgctgccttccgtgctgtctactgnatcctcatgtgtcnccaatggtacacgcccctg

SEQ ID NO: 58495 - DNA, 588 bp, Homo Sapiens
ttttcaaattcatagcatttttattaaaagaacaaaatattaaggcacaaaatacatcaatttttcaaatgaaaacccttcaaacggttatgtcctacattcaacgaaacttcttccaaattacggaataatttaactttttaaaatagaaaaatacaagttcttaaatgcctaaaatttctccccaaataaatgttttcttagttttaatgaagtctcttcatgcagtactgagctccaatattataatgtacacttccttaaaaatctagttttgccacttatatacattcaatatgtttaaccagtatattaaccagtatattaaccaatatgttaaacttcttttaagtataaggcttggtattttgtattgcttattgcatgctttgatcatacaaagacacaagtaccagaactagtgattataaatctagcatagcatctgtcaactttagtcatgtacagcctagtgcaacagactcgaacttttttttaaaaaaaggatacataactcaaaatgtatatgtacattttttatactttcagcttgacagtatagtaatgtaaacattgtactgtaataca

SEQ ID NO: 58496 - DNA, 529 bp, Homo Sapiens
  misc_feature (345)..(345): n is a, c, g, or t
  misc_feature (386)..(386): n is a, c, g, or t
  misc_feature (400)..(400): n is a, c, g, or t
  misc_feature (441)..(441): n is a, c, g, or t
  misc_feature (447)..(447): n is a, c, g, or t
  misc_feature (462)..(462): n is a, c, g, or t
  misc_feature (470)..(470): n is a, c, g, or t
  misc_feature (491)..(491): n is a, c, g, or t
  misc_feature (520)..(520): n is a, c, g, or t
ttttttttaaagggaacacgctatgggatagagactagagaaagcagtgggacaaactgctgaccagcaaaaaagccgtataaactttcttttctgtgttgaatcttcagtcacaactagcaatcaccgtatcccagctttgttcttactcctaaacatttctatcccagaagcaactcttgtgctgtcatctctctggtgagaagtgctaaaaatgaaacaagacaagacccctggggccccaagggacctgggattcctgggccgaggggaaagtggggccaggcaccacagccctgggtcccccaggcaaggaaggcaaagggggctcttggggccaccgtnggcgttcttgtggcttgcctccaccttaggcacttccagcngggcacagccttgnaggggttgcccgccctgggggccagctggggttccccgggntcccantttaaacggccattncgaaggantttcctttggggatttttttnggtttcccaaagacaaggttaattcggtnccgtttaag

SEQ ID NO: 58497 - DNA, 680 bp, Homo Sapiens
  misc_feature (504)..(504): n is a, c, g, or t
  misc_feature (510)..(510): n is a, c, g, or t
  misc_feature (528)..(528): n is a, c, g, or t
  misc_feature (590)..(590): n is a, c, g, or t
ttagactggggttaatgttttattaatgataacctacattcacactgcatttctaagatttacatccaaagagcatactgtatttacatgcaccggtcagcccaagataacaaattcaaaccatggctgcgttaagacaatggtttgttccaattaaattaaacagataatactcttatcaccccccttggacatgtacaataagacccctctttctcccctcaaggaatataaaattgcattgataactgcactgatgagcaacaattacatttgaaacatttaaaacctgagagagaaacccaaatatgtttaagcactcacgtctacactcaaaatgccctgtgaactctagtgtaacacagattgctcagtggtcaacagtgcatgatctagctggctctgatagggactgacgccggctgctggcttttaacgggaagtgctattcttgcccagggcagagagagctacatccccgctgcctgcttgacggacagtcangggctnttgttgttggtttgtttntgcttttttttttagacggagtctcgctctgtcgcccaggctggagtgcagagagatagatntgtctaagagcttcatggctcagccgcaggtcaatccccgtccgagtgaccgtgaactgaaaaggccacagctggttgagcttctgccat

SEQ ID NO: 58498 - DNA, 580 bp, Homo Sapiens
ccatcacctttaaaaatatttataaaatagttccaaaaatctgatatctgaaaagcaatccaagcctgtgtaaatgggaatcactgataagtatcatacatctgtatcagcttggcttggaccatgacaacattgattctctttatgtcactccttggcacctggacaaattcaatccccggtacttaagtcacactgccaagccctcggccctgactatcgtcttgattgctgttcctttctggttcaaacataaaatcatttttgtggcaccaagaacataacaaaaaataaaacaaacacacaccacaccaccacattttgttgggcggaccccggcgcacccagcaaaggtctcttacagacacatcactgacgtagacggacacgcgagcgacccacgagacagcagatgaacacagggggacaacagccaccgtccacaaacgagaacacagggcgcgcgaagaacacagaggggaggacacatcccaccaaccaacacacagcccgcgcgacacacaacagacacgacaacacaccagacaaggccgcgaggacatcccgcgcacaacccacg

SEQ ID NO: 58499 - DNA, 525 bp, Homo Sapiens
  misc_feature (355)..(355): n is a, c, g, or t
  misc_feature (379)..(379): n is a, c, g, or t
  misc_feature (525)..(525): n is a, c, g, or t
cacagcaacacgtataggagactctccccgagatcttctagggagtgacccatctatttttgtttgggaagaggaaactccgaaatgggatcgcggaagacttaaagggccaggctgatttttttttcctactggtctctgaggctgtggttgctacagggtcaccacgagcttggcttacttgtctcatccttcccttgcctggtatcattttctcagttctcccaaaagccatgtcccggcccttgctcatcaccttcaccccagccactgaccccagcgacctctggaaggatgggcagcagcagccacagcccgagaagccagagtccaccctgggatggggctgcagctnaggctttctatgaggccctgattngggatgagagcagcgtcctggactcccagagatctcagattgaacctggccagaggaaagaaagagaaagaaaagaggattattgaaggcaccagcagcagaagcattggcagaagggagcttcaggaagactgggacaagggagn

SEQ ID NO: 58500 - DNA, 1881 bp, Homo Sapiens
tcgtgcatggcagagatggcgactgcgactcggctgctggggtggcgtgtggcgagctggaggctgcggccgccgcttgccggcttcgtttcccagcgggcccactcgcttttgcccgtggacgatgcaatcaatgggctaagcgaggagcagaggcagcttcgtcagaccatggctaagttccttcaggagcacctggcccccaaggcccaggagatcgatcgcagcaatgagttcaagaacctgcgagaattttggaagcagctggggaacctgggcgtattgggcatcacagcccctgttcagtatggcggctccggcctgggctacctggagcatgtgctggtgatggaggagatatcccgagcttccggagcagtggggctcagttacggtgcccactccaacctctgcatcaaccagcttgtacgcaatgggaatgaggcccagaaagagaagtatctcccgaagctgatcagtggtgagtacatcggagccctggccatgagtgagcccaatgcaggctctgatgttgtctctatgaagctcaaagcggaaaagaaaggaaatcactacatcctgaatggcaacaagttctggatcactaatggccctgatgctgacgtcctgattgtctatgccaagacagatctggctgctgtgccagcttctcggggcatcacagccttcattgtggagaagggtatgcctggctttagcacctctaagaagctggacaagctggggatgaggggctctaacacctgtgagctaatctttgaagactgcaagattcctgctgccaacatcctgggccatgagaataagggtgtctacgtgctgatgagtgggctggacctggagcggctggtgctggccggggggcctcttgggctcatgcaagcggtcctggaccacaccattccctacctgcacgtgagggaagcctttggccagaagatcggccacttccagttgatgcaggggaagatggctgacatgtacacccgcctcatggcgtgtcggcagtatgtctacaatgtcgccaaggcctgcgatgagggccattgcactgctaaggactgtgcaggtgtgattctttactcagctgagtgtgctacacaggtagccctggacggcattcagtgttttggtggcaatggctacatcaatgactttcccatgggccgctttcttcgagatgccaagctgtatgagataggggctgggaccagcgaggtgaggcggctggtcatcggcagagccttcaatgcagactttcactagtcctgagacccttcgcccccttttcctgcacctagtggcctttcttgggaagtagagatgtggcggctttcccaccctgcccacagcaggccctcctgcccagctgctcttgtcagccctctggcctctggatgaggttgagttctccacaacagctcccaagcatcatgggcctcgcagccgggcctgtgccacggctagtgttgtgtgatttaaaatggactcagcaggaagcatattgtctggggattgttgggacaggttttggtgactctgtgcccttgctctctaacttctgagcccacctcccagggtaggcacctgggggcatgcaggtgcccacctcccagggtaggcacctgggggcatgcaggtacccacctctttctcttgggtgaggctctggcaaggagatctctctgctcaagcacagcagaatcatggcccctctccatgaattggaacttggtacaggttaagtatccctaatcctgaaatctgaaacacttgtggttccaagcattttggataaggcaaattcaactttcagtctcttttctgggggaaaaaaataataaacctagcctagccagg

SEQ ID NO: 58501 - DNA, 795 bp, Homo Sapiens
ggctgattttcatgagtcgccttcaaaactctcgtgtagggttgacaatgtgggggggtgggggatccagcttattcttttattttcaagtccattcttggggctggtggggaggcaggagaatacccctccctaagcccttagtgtgtgccgagcttgctttgtgatgttggcaggggaggggagacctgggtggtgactgagttccctttatcaaacccttcaatgggcacaaaattgagtgcttgattttaggttttatttttttatgaatgtccaaatctgtgtttccccctgccctcccagactgtgtggccagttgaaagtgtctggtttgtgttcatctctccctcatttctggagcagggcctgagaccctgccacatctcctatgctctgcatccacgcctcttttggacattaaaggttgattgatgcaaaaaaaaaaaaaaaacacaaaaaaaaaaaaaaaaaaaaacccgggggcctctttttcgggggcgggggagaaaacaagggatatagaaaagaggcaccagtgggtcacaaacgctgtttcctgacgccccaatttgtgggtaaaacaggggtgacaattcgagggggaacacccacaaatgtggggcgggcgccaatgacaatcttcggcaataaaccgcggggtgtaacccggcggttaatgaacaagtcggaggacaacaaacagacagaacgaagacggcgacgaatcaatggagagcccacagacagagaagagaacacgagcagcgagatataaccacgcacacagagcga

SEQ ID NO: 58502 - DNA, 680 bp, Homo Sapiens
tcaaaaacatatgcaaaaacattttatttataatagatcaacatttttgacatgaaaggtagccactttcaatttctcaggaatgcctagaacccaacagttttcagaaagactacttagttcacaattatttcactgtaggtaaatgaaataatttcagaatgaactttttaaatggctttgcctatggaaagttgttttataaacttgaatgtatggtaagctagctttcccaggaaatgaatgtaatccaactatgttccaaatgtattaaaccagtttatacaacaaatatgagaatcacttatgtgcatcaactgtgctaaaacaagaattctttttatcaaaatattcatttttcaaaaaggcctcacattaacccctcaaaccaagcacccccttcctatgtccagcactcttttctacttcgagttgcatgactgtagagacaactgtcaaattccagtggaactgtacactgacttaagactctatgtaatatacatcaaacacaggaggtcactgactttaagggacgaggtgataactaactagttataattcagcaaatgtcttttttagtttagagggaaaaagtacccccagtgtcttaactttcaggacttcccgtaacacccgatgaaaggtctcccaaaatagatccttgatatatctaatta

SEQ ID NO: 58503 - DNA, 552 bp, Homo Sapiens
gcaaagtggcaaagtggctttatgcgcaggctctgggccgagtaccaggagaaggtgcctccggaggaggccgggatgcggctggggctgtctggcacggggaccttcgtggccagccacgtggccttgggacgcccgcgtccagccagggctgaggacccaggccagagcccctcccgcccagcacccgcgacgccagcctggatgctggggtcactaagtgaggtactcgttggttccctggatgggccaccctttctgccctgggaggaggctctggggtgtgcaggagggagccagctaacaggtcagtgttctgggcagaagtggggcacgaagtaacacaggccctgaggacacagggacacaggtgacacgggccttaaaagtggcttgtgacatgagcaacccaggcccctgaaaaggggtgacctgaagacagaggttccccaggtggggtgagggacacccgacgatgcagcacccccccagggaaacgtgaggcttcaagagactcagtgtggggccctcgctctcctcctgggcgagcag

SEQ ID NO: 58504 - DNA, 605 bp, Homo Sapiens
  misc_feature (528)..(528): n is a, c, g, or t
  misc_feature (562)..(562): n is a, c, g, or t
  misc_feature (577)..(577): n is a, c, g, or t
ttcagaaaagaaagaaaacactttatttgtaaagagaaaatggaacttagtacatatgccaaaataaatctgtaacgcaggccacttctctgggccccatcttgagtaggttaaagggtcaccttagagactagaaacacaattaagaggcacaaatccacacagaaaatatgcatattttgtctcctttccccccaaaacaagctgcatatacttgtgtaaacttgttgatttgtaaaacatgtctagtactgcagacaaatgtgtgggatgaaaggaaataaaagccatgaaaacagggccaggtggaataagttctcctagctcagaaggatctcaacctcttgcaagttacttttcacttttaagggcccttaaagaagcatttgcttagctctgtatccaggccatctctccctccccgaagagcaacagaccagcaactgacattaaggtcacatgggtgggtggggagtagaattgcgggggtgacagttccagccaatccagacacgaatcatgtttganggacccgagcctcaagggtgattccctgctaggntggtccccactgtcnaaacttgttggggccactcttgccaaac

SEQ ID NO: 58505 - DNA, 6520 bp, Homo Sapiens; identical to SEQ ID NO: 28907
  misc_feature (2520)..(2520): n is a, c, g, or t

SEQ ID NO: 58506 - DNA, 2267 bp, Homo Sapiens; identical to SEQ ID NO: 24254

SEQ ID NO: 58507 - DNA, 6873 bp, Homo Sapiens; identical to SEQ ID NO: 22445

SEQ ID NO: 58508 - DNA, 525 bp, Homo Sapiens
ttggctaggcttcttcaaatcgtgggaataaacacaatctttaaatacataataataacagatatatgactgatatgaacaaaatccttaaaagaccatgctagtgctagtttacattttctgaactaaaaggggttaaatgtctaaagaagaggagcagcaaagaagcactgagggtgatctcttccttttctttctccctttagtacagaaagggaaggatttaaatctgcttatacacatcagctcacaagggagaggattaggaaggttggaacagagttggaaaatgctcagaacattctggactccaatattaatataacatttaacaaggaagcatctgtagtggggcttctgtgaaattaaacattttaacattacaacctacatgtatgcatatttgtgaaatttcctaataatcgatttatggtttcacaaaggagtctatgaaattagctcattctaagggaaagaaattgtcaattggaaacgtaaggtgggaagcagatgtagctcaggaat

SEQ ID NO: 58509 - DNA, 621 bp, Homo Sapiens
  misc_feature (612)..(612): n is a, c, g, or t
attcatttatttattttttgcaaacaattttagaggcagggtgttaaactgattaaaatttcacaagattgacattattgcttaaagtgcttgaattggttacattttaaaaaattaaggtacagattattttaaataaaaactacaatatttttagcaacaaaataataggaatgccacacaaatacagtaactattttggttatacagaaatggaagccaaaaataaatttattgttatactggaaaacagaaatttaattaggcagaaaagtaggaaataattttccctgacccatgccacttacatgagttcattacaatagtgctgataaatgccttgaccatataatagcaaacaagggcaaaacatttagtgcacaatattttaatacacgtgaatatacaaagttgatcaaaatgcaatgttgaaagataaaatccatctgtaataaagctacactccaatatctaaaataagccctaagctccagttagaacatagatcattattaggcatgcccatgaaattaagggtatccatgaaaataaatgcatagggatcatttctgacatttttccctattttatcttaaacccaaaatacaccangccataaaa

SEQ ID NO: 58510 - DNA, 587 bp, Homo Sapiens
tttttttgttcaaaataatgtatttaatagacaatatctctcattgtacaataattaaaacaaaacgaaaaccacttttgaatggaattaattgggtctgtaattttcaaatagtcaaggtgaaattctgccaaacctttacttccatcatgtttatagataacgtaactgaaaaattaacaaataccttttcttcctccatacagattccaggatatttaaataagtttttttttctcctctgcttttagaaatagtcaaaactaccaaactttgttttcattttaaaagactcccaaaatgggggtgggggtgagatgggatcatacatacacatacactcacacatacactcacccccttccctagtagggatgagggaatggaggcttaagtatattatttaggatatttggcataattaaaaataagaggtgggagaggggagggaaaaacattattgatgactgctgataaccaaaatacaatgaaatatatagagaattttattcatatttgatgggaaaccaactttttttcattgaacagatacttctgaaagtatcccaggctcacgttctttaata

SEQ ID NO: 58511 - DNA, 567 bp, Homo Sapiens
  misc_feature (555)..(555): n is a, c, g, or t
gatgtgttgacactgataatttccagcttgagcaactgaatagatggcaatgtcacttgattgtcaaaaatagatacttgtatccctacttggagcaaacttaccacaaaaatacatttctttcttaaatacatgggctctgagtttctattccttgacctggagcaggattacaaaataagaagaaatgcattccatctcatctacctctcctagtctcttagagttataactgagaccaagctaagaacctcctagttgcatgtaaattataaccattaattgactggaattcctagcatgtacttggtcttcattaacattcatgttaactgcaggccaaaacagttctgctgctgttaaatcattgattctgcaatggcctaaacactaactcttggataactagccatctaaatcccccttcacccacactttatttctgagattctcagtaaagctctccagaaacccggttgaccatggaaaaaccaggaggaatcatacttctggatggggtttctcctccaaacttatatcggaactggacaccanttttgggaggtt

SEQ ID NO: 58512 - DNA, 573 bp, Homo Sapiens
  misc_feature (496)..(496): n is a, c, g, or t
ttacttttaagaagaacatttttctgtttattcttagaatgtgaattttttttttcaactcagggccaagtacaaacttttgatttttgaaattttttcaactcagggccaagtacaatcttttgatttaaaaattttttttcatgaacaaaccatcagtagttattaaggagcccaagaaataggagatgtgaaagcaggatttctttgtgtttcctttgaatgttgttattttgagtattatcattatcaggtagaggaagaaaggtaggctgggaagtaggtccttatgatatcttgactatggatcccagatttacatttcacctgtcacagagcacacataatttagataaacatgtcaagaatgacataaacagaggtaaacacaaggagctttacatttggaaccaaaaaataaaaattagaaaaattattacctatattaataacaaaaaaattacttaaactctaggaccctgtaggagtctagctntctcccctgtatacttgggatgcactttattggctggcaaacctttgataaaatcagaagtttgagaaatgtttgac

SEQ ID NO: 58513 - DNA, 550 bp, Homo Sapiens
ttttttcgagccgcactcggccaccaccgcgggggccggcggaaccctcgtttctcccccccaaccccgtcgagggggaagcggaggagggtcctctgcgagcgggtcgctaacggcagcgctaccataacggaggcagagacagaggcggcggcccgggggatccggtacccccaaggcacgcctctcagatcgctagagaaggcttttctcaccgagggtgggtcacactccccccacccgccagccgttcctccttgggcccgcagaggcgccgagggacgcctggggaagggaggggggccctgcggtacgaggaaacacctgcgcgcggccacctcgagcgttcgcgttcagggcgggggcccggccggtgcgcgcgtgcgcgcaaccccaccaggcccccccgtccacccacctccttccttccgaggcagagcgcctccgaagtcaacccacacacgaccggtcggaggcagaacggcagcccctcggcggccggccggcgcacgcgtcacaccggcccgaacccaccgcgatcgctcacacg

SEQ ID NO: 58514 - DNA, 610 bp, Homo Sapiens
tttttttttttgttgtttagaaatatttattatcccctccccccacatacagattacttctcagaaacatgaagatattatccatgtcctcatcaattacagtttgtagaaaataaacttaactcatatcccatcaacaatgtatttctatcatttttttaaacaatagccatttcatttttccatgttagttccagaatagcttcaagttttatcttttggatcgaatccagtcaatctttgtttataggtaacagtttcctaacagatcccctcccccaacccctaaaaaaattctatatcctaagtgataaactcttcttgtacattcagcaaactttatattggaaaagaaaaagaataattgagataggtatttactttcgtgcacagtaataaatctagctgagctgctacaccttgctttgcaaagatgtttacataaaataaatcatctcttatcaagttacaatggtaatttcttgaaatgtagatatgaaagctatacacttaatccactgaaatttccttctaattttttaatctgtaattaaaccatcaccataaggacaagcttcatcccaagatgttcccccttttcccctcagct

SEQ ID NO: 58515 - DNA, 604 bp, Homo Sapiens
  misc_feature (453)..(453): n is a, c, g, or t
  misc_feature (496)..(496): n is a, c, g, or t
  misc_feature (500)..(500): n is a, c, g, or t
  misc_feature (539)..(539): n is a, c, g, or t
  misc_feature (584)..(584): n is a, c, g, or t
  misc_feature (593)..(593): n is a, c, g, or t
  misc_feature (600)..(600): n is a, c, g, or t
aagttaattacagcatttgaggaagaggatctaattccacacaaaatggaagactctaaaatgtacccattaaactgctaaaaaataaattgagtggtgagaataccacataagcccagtttagattctgagtgctgtcaccctgtgattacaattatacagactcttccaagcttatagctagagctcctggaagctattttatacctgatgcaaggacaaaaaaaccacaactcaggaaggaattaagtcctgaattattggcttcatcacatccaccctctccaccccaaaacagcacaaaagaaacagtgaccacaccctgtagatctttttgtgtaaaagaggtaatgaagacctgggatgggaacaagtcatgaagatctgtctttaaaaggtccctttcaggtaaatttgtacacaccatcaagcaacaagcctctcatcagttanggttaggaaaccaaggttcaattctcaggaaatcacaatttcnttcntttactccatataatttacaaggtgcctatatttatccncttccccttgcagccctttcttaataaaaaaaaaccggctccctnccgggggcnccaattnccca

SEQ ID NO: 58516 - DNA, 1085 bp, Homo Sapiens
  misc_feature (673)..(673): n is a, c, g, or t
  misc_feature (1020)..(1020): n is a, c, g, or t
gatgcaataatagtttattatgatatagtttatgtaaagttaggtaatatttacaaaataaaaatgatcagctacatccagggaatctagcatgtcacacaaaggaataaatattctgacaaagtaacacttcaattgtagtgaatcgttgatcacaaactaactttgtaaaaaaaaaaaagcctcaagacgcccctcccccccccccccccaaaaaaaaagcagcagctcagctggtcaggctttcttgagacactggcctgacagtggatggcccaccctaccccggggctctacttcttagacccgagcgctgtgctggaacctagggaggcggtactcattcagccctttcttctgcacacagcttttagtctgtttgttaagcgttaccacttagcattagaacagaaatgaaacaccagttggaattatacaagctgcttcttttcatcatgtgacagaaggtttgtgagaactgctggaatcacaagctgcggcagaggtgactgaagcatttccactccgttcacatatagcgccccagcttggcacagtaggttttgcctttgataacgaattttgacactgaccctgacagaagggcacagctgtgagaaaaatcattaagaattgtaattgttgaggagccacttggatgcttctacttttnttaattgtaccctagaaaccacatgaagaaatcttatcttaactggtttgaatctaacagttgtcagagaacgttgttatactaaagggaatcctaaatccttaaaaacatttaattgagctggggattaaagtaacacaggagaactgggggttttacaacttttctctcgtttttaaactaggttgcccccttatcttcaagccaggggggcagaagtatggctaaccaaactgaaccctctgtgggtgtgccccaaaactcttcataagggcaactgccggggagaccacatacgtgtccggaaaagggtaccctctgtctggcctcccgccctacactgaggncatattaatcttggatgtttttccaccccaaaggggcaaaaaagtttcttcccccccgccccaac
